(19) United States
(12) Patent Application Publication
(10) Pub. No.: US 2025/0109173 A1
(43) Pub. Date: Apr. 3, 2025

(54) RECOMBINANT POLYPEPTIDES CONTAINING AT LEAST ONE IMMUNOGENIC FRAGMENT AND ANTIBODY FC REGION AND USES THEREOF

(71) Applicant: BOOST BIOPHARMA, INC., Amherst, MA (US)

(72) Inventors: Fritz Schomburg, Madison, WI (US); David Rancour, Madison, WI (US)

(73) Assignee: BOOST BIOPHARMA, INC., Amherst, MA (US)

(21) Appl. No.: 18/725,518

(22) PCT Filed: Dec. 30, 2022
(86) PCT No.: PCT/US2022/082653

§ 371 Date: Jun. 28, 2024

Related U.S. Application Data
(60) Provisional application No. 63/295,776, filed on Dec. 31, 2021.

(51) Int. Cl. C07K 14/005; A61K 39/00

(52) U.S. Cl. CPC C07K 14/005; A61K 39/00; A61K 2039/55505; C07K 2319/30; C12N 2770/20022; C12N 2770/20034

(57) ABSTRACT

Provided is a recombinant polypeptide containing at least one immunogenic fragment of Severe Acute Respiratory Syndrome Coronavirus 2 (SARS-COV-2) spike glycoprotein, and pharmaceutical compositions containing the same.

### CROSS-REFERENCE TO PRIOR APPLICATION

[0001] This application claims benefit to U.S. Provisional Patent Application No. 63/295,776, filed Dec. 31, 2021, which is hereby incorporated by reference in its entirety.

### INCORPORATION-BY-REFERENCE OF MATERIAL SUBMITTED ELECTRONICALLY

[0002] Incorporated by reference in its entirety herein is a computer-readable nucleotide/amino acid sequence listing submitted concurrently herewith and identified as follows: One 1,404,167 Byte XML file named “SEQL_766399,” created on Dec. 13, 2022.

### BACKGROUND OF THE INVENTION

[0003] The rapid evolution of new SARS-COV-2 variants containing mutations that alter the amino acid sequence of the Spike protein resulting in altered function, and altered resistance to native immune defenses and to immune defenses elicited by currently marketed vaccines has led to a need for alternative platforms that allow for incorporation of new variant mutations in a robust vaccine.

### BRIEF SUMMARY OF THE INVENTION

[0004] The present invention relates to recombinant polypeptides that include at least one immunogenic fragment of Severe Acute Respiratory Syndrome Coronavirus 2 (SARS-COV-2) spike glycoprotein and an antibody Fc region. In some embodiments, the recombinant polypeptide includes more than one immunogenic fragment, e.g., two, three, four, five, or more immunogenic fragments. In some embodiments, the recombinant polypeptide includes one or more immunogenic fragments of Severe Acute Respiratory Syndrome Coronavirus (SARS-COV) and/or Middle Eastern Respiratory Syndrome Coronavirus (MERS-COV) and an antibody Fc region, optionally in combination with one or more SARS-COV-2 immunogenic fragments.

[0005] The present invention further relates to pharmaceutical compositions, such as vaccines, that include the recombinant polypeptide. In some embodiments, the pharmaceutical composition includes an adjuvant.

[0006] The present invention also relates to a method for preventing, inhibiting, reducing, eliminating, protecting, and/or delaying the onset of an infection or an infectious clinical condition caused by a beta coronavirus in a subject, wherein the method includes administering to the subject at least one recombinant polypeptide of the invention or a pharmaceutical composition including the same.

[0007] The present invention further relates to a method for inducing an immune response against a coronavirus in a subject, wherein the method includes administering to the subject at least one recombinant polypeptide of the invention or a pharmaceutical composition including the same.

### BRIEF DESCRIPTION OF THE DRAWINGS

[0008] The patent or application file contains at least one drawing executed in color. Copies of this patent or patent application publication with color drawing(s) will be provided by the Office upon request and payment of the necessary fee.

[0009] FIG. 1 is a graph depicting Spike S1 protein IgG response in Rhesus macaques at certain time points (in weeks) after initial injection with an exemplary construct.

[0010] FIG. 2A is an image showing CHO cell expression of CTD_short_a-Fc (LS2330) after 5 days. Protein was affinity purified using Protein A agarose and analyzed by reducing SDS-PAGE and detected by Coomassie R-250 staining. M-Molecular weight markers. As can be seen in each of FIGS. 2A-2D, the constructs were resistant to proteolytic degradation during expression thus facilitating higher yields of intact, soluble protein

[0011] FIG. 2B is an image showing CHO cell expression of CTD_long_a-Fc (LS3472) after 5 days. Protein was affinity purified using Protein A agarose and analyzed by reducing SDS-PAGE and detected by Coomassie R-250 staining. Protein loads per lane are indicated.

[0012] FIG. 2C is an image showing CHO cell expression of CTD-deletion series after 5 days. Protein was affinity purified using Protein A agarose from equal volumes of transfected culture. Eluted protein was loaded based on volume, separated by reducing SDS-PAGE, and detected by Coomassie R-250 staining. Load volumes were twice as large for samples (left to right) CTD_vs_a-Fc to RBD_e-Fc compared to the samples on the left of the gel (CTD_long_b-Fc to CTD_short_h-Fc).

[0013] FIG. 2D is an image showing CHO cell expression of CTD_short_i-Fc (LS2371) after 5 days. Protein was affinity purified using Protein A agarose and analyzed by reducing SDS-PAGE and detected by Coomassie R-250 staining.

[0014] FIG. 3 is an image showing CHO cell expression of (CTD_short_d)₂-Fc (clone 1 through 4 correspond to strains LS2397 through 2400; SEQ ID NO: 161) and (CTD_short_i)₂-Fc (clone 1 through 4 correspond to strains LS2401 through 2404; SEQ ID NO: 163) after 4 or 7 days as indicated. Protein was affinity purified using Protein A agarose from equal volumes of transfected culture. Eluted protein was loaded based on volume, separated by reducing SDS-PAGE, and detected by Coomassie R-250 staining. M-Molecular weight markers.

[0015] FIG. 4 is an image showing CHO cell expression of mutant (CTD_short_i)₂-Fc constructs wherein amino acid mutations corresponding to newly identified SARS-COV-2 variants have been added to both CTD domains (D1 and D2) or second domain (D2) only of the CTD dimer. The mutants tested include (a) D1 and D2 mutations for hybrid P.1 and CAL.20C variants; K417T, L452R, E484K, N501 Y (Strain 2435), (b) D2 mutations for 501. V2 variant/B.1.351, K417N, E484K, N501Y (Strains 2421), and (c) D2 mutations for hybrid P.1 and CAL.20C variants; K417T, L452R, E484K, N501Y (Strain 2423). Protein was affinity purified using Protein A agarose from equal volumes of 4-day transfected culture. Eluted protein was loaded based on volume, separated by reducing SDS-PAGE, and detected by Coomassie R-250 staining. M-Molecular weight markers. Protein loads were 3.48 (strain 2435), 4.52 (strain 2421), and 3.14 μg (strain 2423).

[0016] FIGS. 5A, 5B, and 5C are graphs showing the results of neutralization assays using serum samples from animals P0101 and P0102 immunized with SEQ ID NO: 73 (LS2330 [CTD_short_a-Fc], which were the subject of analysis discussed in Example 1. Infectivity of serum neutralized pseudotypes virus using 295T/ACE2 target cells was quantified by measuring NanoLuc luciferase activity (RLU) and graphed on the y-axis. Reciprocal serum dilution is shown on the x-axis.

[0017] FIG. 6 is a set of SDS-PAGE gel photographs depicting expression of certain immunogenic fragment constructs in CHO-S cells or in ExpiCHO cells. “M1” and “M2” denote markers. Full-length protein is seen as the primary band at about 55-60 kDa. A dimer of the protein (an in vitro result of high concentration of purified protein) is found at about 120 kDa. Degraded protein can be seen at about 38 kDa with respect to CTD-short_g grown in CHO-S cells.

### DETAILED DESCRIPTION OF THE INVENTION

[0018] Recombinant polypeptides of the invention can include any suitable immunogenic fragment or fragments of the Severe Acute Respiratory Syndrome Coronavirus 2 (SARS-COV-2) spike glycoprotein and any suitable antibody Fc region. In some embodiments, an immunogenic fragment comprises, consist of, or consist essentially of, the N-terminal domain of the S1 subunit, the C-terminal domain of the S1 subunit, or both. In certain embodiments, an immunogenic fragment can include the complete SARS-COV-2 spike glycoprotein. Recombinant polypeptides of the invention include at least one immunogenic fragment, and can contain two, three, four, five, six, seven, eight, nine, ten, eleven, twelve, thirteen, fourteen, fifteen, or more such immunogenic fragments.

[0019] In some embodiments, one or more of the immunogenic fragments are identical to a wild-type SARS-COV-2 spike glycoprotein, or any portion thereof. Wild-type spike glycoproteins include those of any SARS-COV-2 strain that has been isolated from a subject. Examples include Wuhan-Hu-1, VOC 202012/01/B.1.1.7 (Alpha or UK), VOC-202102/02 (B.1.1.7 with E484K) (UK), 501.V2/B.1.351 (South Africa), B.1.429/CAL.20C (California), B.1.525, and Lineage P.1 (Gamma or Brazil), B.1.427 (Epsilon), B.1.429 (Epsilon), B.1.617.1, B.1.617.2 (Delta), B.1.526 (Iota), B.1.617.3, B.1, A.2.5, C.36.3, B.1.1.318, B.1.351, B.1.621, B.1.525, P.1.1, P.2 (Zeta), B.1.623, R.1, B.1.1.7, B.1.351, B.1.351.3, A.30 (EPI_ISL_1347942), B.1.1.529 (Omicron), BA.2.75, BA.2.75.2, BA.4, BA.4.6, BA.5, BA.5.2.6, BF.7, BF.11, BN.1, and BQ.1. In some embodiments, one or more of the immunogenic fragments are identical to a wild-type SARS-COV or MERS spike glycoprotein. Wild-type SARS-COV and MERS spike glycoproteins include those of any SARS-COV or MERS strain that has been isolated from a subject. Examples of such strains include SARS coronavirus Tor2 (GenBank accession number NC_004718.3) and MERS coronavirus (GenBank accession number NC_019843.3).

[0020] In some embodiments, an immunogenic fragment comprises, consists of, or consists essentially of an amino acid sequence with at least 90%, preferably at least 91%, 92%, 93%, 94%, 95%, 96%, 97%, 98%, or 99%, sequence identity to a wild-type SARS-COV-2 spike glycoprotein, or any portion thereof. In some embodiments, an immunogenic fragment comprises, consists of, or consists essentially of an amino acid sequence with at least 90%, preferably at least 91%, 92%, 93%, 94%, 95%, 96%, 97%, 98%, or 99%, sequence identity to a wild-type SARS-COV or MERS spike glycoprotein, or any portion thereof.

[0021] In some embodiments, one or more of the immunogenic fragments are identical to a wild-type SARS-COV-2 spike glycoprotein, or any portion thereof, except for at one or more of the following positions of the amino acid sequence: L5, A67, H69, V70, D80, T95, G142, Y144, E154, F157, D253, R346, G339, S371, S373, S375, K417, N440, G446, Y449, L452, F456, S477, T478, E484, F486, N487, Q493, Q496, Q498, T500, N501, G502, Y505, D614, Q677, P681, A701, T791, T859, F888, D950, and Q1071, wherein the positions of the listed amino acid residues correspond to the wild-type amino acid sequence QHD43416 (ncbi.nlm.nih.gov/protein/QHD43416). The mutations at these positions can be any suitable mutation, including conservative and non-conservative amino acid mutations. For instance, a conservative substitution can replace one aliphatic amino acid (i.e., Glycine, Alanine, Valine, Leucine, Methionine or Isoleucine) for another, one polar, uncharged R group amino acid (i.e., Serine, Cysteine, Threonine, Proline, Asparagine, or Methionine) for another, one positively charged R group amino acid (i.e., Histidine, Lysine, or Arginine) for another, one negatively charged R group amino acid (i.e., Aspartate or Glutamate) for another, and one non-polar, aromatic R group amino acid (i.e., Phenylalanine, Tyrosine, or Tryptophan) for another. In some embodiments, one or more of the immunogenic fragments are identical to a wild-type SARS-CoV-2 spike glycoprotein, or any portion thereof, except for one or more of the following amino acid substitutions and deletions: L5F, A67V, 69del, 70del, D80G, T95I, G142D, 144del, E154K, F157S, D253G, R346K, G339D, S371L, S373P, S375F, N440K, G446S, L452R, S477N, E484K, E484Q, E484A, K417N, K417T, T478K, Q493R, Q496S, Q498R, N501Y, Y505H, D614G, Q677H, T791I, P681H, P681R, A701V, F888L, T859N, D950H, D950N, and Q1071H, wherein the listed amino acid substitutions and deletions are relative to the wild-type amino acid sequence QHD43416 (ncbi.nlm.nih.gov/protein/QHD43416). In one embodiment, the one or more amino acid substitutions and/or deletions is L452R. In another embodiment, the one or more amino acid substitutions and/or deletions is E484K. In a further embodiment, the one or more protein substitutions and/or deletions are K417N, E484K, and N501Y. In yet another embodiment, the one or more substitutions are and/or deletions are K417T, E484K, and N501Y. In another embodiment, the one or more amino acid substitutions and/or deletions are N501Y, 69del, 70del, and P681H. In another embodiment, the one or more amino acid substitutions and/or deletions are K417T, L452R, E484K, and N501Y. In another embodiment, the one or more amino acid substitutions and/or deletions are L452R and T478K. In another embodiment, the one or more amino acid substitutions and/or deletions are K417N, L452R, and T478K. In another embodiment, the one or more amino acid substitutions and/or deletions are R346K, E484K, and N501Y. In another embodiment, the one or more amino acid substitutions and/or deletions are R346K, T478R, and E484K. In another embodiment, the one or more amino acid substitutions and/or deletions are R346K, K417N, L452R, 478K, E484K, and N501Y. In another embodiment, the one or more amino acid substitutions and/or deletions are R346K, K417N, L452R, T478R, E484K, and N501Y. In another embodiment, the one or more amino acid substitutions and/or deletions are G339D, S371L, S373P, S375F, K417N, N440K, G446S, S477N, T478K, E484A, Q493K, G496S, Q498R, N501Y, and Y505H. In another embodiment, the one or more amino acid substitutions and/or deletions are G339D, S371L, S373P, S375F, K417N, N440K, G446S, S477N, T478K, E484A, Q493R, G496S, Q498R, N501Y, and Y505H. In another embodiment, the one or more amino acid substitutions and/or deletions are G339D, R346K, S371L, S373P, S375F, K417N, N440K, G446S, L452R, S477N, T478K, E484K, Q493R, G496S, Q498R, N501Y, and Y505H. In another embodiment, the one or more amino acid substitutions and/or deletions are G339D, R346K, S371L, S373P, S375F, K417N, N440K, G446S, L452R, S477N, T478K, E484A, Q493R, G496S, Q498R, N501Y, and Y505H. In another embodiment, the one or more amino acid substitutions and/or deletions are G339D, R346K, S371L, S373P, S375F, K417N, N440K, G446S, L452R, S477N, T478R, E484A, Q493R, G496S, Q498R, N501Y, and Y505H. In another embodiment, the one or more amino acid substitutions and/or deletions are G339D, R346K, S371L, S373P, S375F, K417N, N440K, G446S, L452R, S477N, T478R, E484K, Q493R, G496S, Q498R, N501Y, and Y505H.

[0022] The subject can be mammalian, including human, non-human primate, horse, pig, cattle, cat, dog, sheep, mink, rodent, hamster, or bat. Subjects can further include western lowland gorilla, northern white-cheeked gibbon, Sumatran orangutan, crab-eating macaque, drill, proboscis monkey, bonobo, chimpanzee, ugandan red colobus, red-shanked douc, golden snub-nosed monkey, green monkey, patas monkey, rhesus macaque, olive baboon, gelade, sooty mangabey, southern pig-tailed macaque, angola colobus, coquerel's sifaka, Gambian pouched rat, Chinese hamster, common gund, beluga whale, blue-eyed black lemur, indri, narwhal, narrow-ridged finless porpoise, harbour porpoise, minke whale, Antarctic minke whale, gray whale, spalax, white-tailed deer, reindeer, southern tamandua, Stephens's kangaroo rat, Père David's deer, transcaucasian mole vole, long-finned pilot whale, Pacific white-sided dolphin, baiji, giant anteater, muskrat, killer whale, common bottlenose dolphin, aye-aye, fat-tailed dwarf lemur, thirteen-lined ground squirrel, yellow-bellied marmot, alpine marmot, golden hamster, sperm whale, daurian ground squirrel, gobi jerboa, barbry sheep, pronghorn, Nancy ma's night monkey, hirola, American bison, zebu, wild yak, cattle, water buffalo, white-eared titi, common marmoset, wild goat, goat, Panamanian white-faced capuchin, cat, Masai giraffe, Nilgiri tahr, Candian lynx, coquerel's giant mouse lemur, Siberian musk deer, sunda clouded leopard, clouded leopard, okapi, sheep, jaguar, leopard, Siberian tiger, Tibetan antelope, little pocket mouse, deer mouse, white-faced saki, cougar, black-capped squirrel monkey, tufted capuchin, arctic ground squirrel, bos indicus x bos Taurus, cheetah, mantled howler, Geoffroy's spider monkey, Damaraland mole-rat, naked mole-rat, hippopotamus, snowshoe hare, Dama gazelle, European rabbit, scimitar oryx, emperor tamarin, and alpaca.

[0023] In some embodiments, one or more of the immunogenic fragments contain one or more mutations, such that the one or more immunogenic fragments are not identical to a wild-type SARS-COV-2 spike glycoprotein, or any portion thereof. The one or more mutations can be any suitable mutation and/or deletion. For example, an immunogenic fragment can contain sequences from two, three, four, five, six, seven, eight, nine, ten, or more strains, such that the resulting fragment is no longer identical to any of its parent strains. In this way, a single immunogenic fragment can present epitopes from multiple wild-type SARS-COV-2 spike glycoproteins, or any portion thereof. This can lead to a more robust immune response and increased immune protection from a range of SARS-COV-2 strains in a subject when a recombinant polypeptide of the invention containing one or more such immunogenic fragments, or a pharmaceutical composition containing the same, is administered to the subject.

[0024] In some embodiments, the nucleic acid sequence encoding an immunogenic fragment includes one, two, three, four, five, six, seven, eight, nine, ten, twenty, thirty, forty, or more point mutations and/or deletions in comparison to the nucleic acid sequence encoding the corresponding fragment of a wild-type or mutant glycoprotein. In some embodiments, the amino acid sequence of an immunogenic fragment includes one, two, three, four, five, six, seven, eight, nine, ten, twenty, thirty, forty, or more substitutions and/or deletions in comparison to the amino acid sequence encoding corresponding fragment of a wild-type or mutant glycoprotein.

[0025] In some embodiments, an immunogenic fragment comprises, consists of, or consists essentially of an amino acid sequence with at least 90%, preferably at least 91%, 92%, 93%, 94%, 95%, 96%, 97%, 98%, or 99%, sequence identity to an amino acid sequence selected from the group consisting of SEQ ID NO: 1 (CTD_long_a), SEQ ID NO: 3 (CTD_long_a_D614G), SEQ ID NO: 5 (CTD_long_a-Dimer), SEQ ID NO: 7 (CTD_long_b), SEQ ID NO: 9 (CTD_long_c), SEQ ID NO: 11 (CTD_long_d), SEQ ID NO: 13 (CTD_long_e), SEQ ID NO: 15 (CTD_long_f), SEQ ID NO: 17 (CTD_long_g), SEQ ID NO: 19 (CTD_long_h), SEQ ID NO: 21 (CTD_long_i), SEQ ID NO: 23 (CTD_short_a), SEQ ID NO: 25 (CTD_short_b), SEQ ID NO: 27 (CTD_short_c), SEQ ID NO: 29 (CTD_short_d), SEQ ID NO: 31 (CTD_short_e), SEQ ID NO: 33 (CTD_short_f), SEQ ID NO: 35 (CTD_short_g), SEQ ID NO: 37 (CTD_short_h), SEQ ID NO: 39 (CTD_short_i), SEQ ID NO: 41 (CTD_vs_a), SEQ ID NO: 43 (CTD_vs_b), SEQ ID NO: 45 (CTD_vs_c), SEQ ID NO: 47 (CTD_vs_d), SEQ ID NO: 49 (CTD_vs_e), SEQ ID NO: 51 (RBD_a), SEQ ID NO: 53 (RBD_b), SEQ ID NO: 55 (RBD_c), SEQ ID NO: 57 (RBD_d), SEQ ID NO: 59 (RBD_e), SEQ ID NO: 61 (NTD_long_a), SEQ ID NO: 63 (NTD_short_a), SEQ ID NO: 171 (RBD-tight), SEQ ID NO: 173 ((RBD-tight)₂), SEQ ID NO: 175 (RBD-extended), SEQ ID NO: 177 ((RBD-extended)₂), SEQ ID NO: 179 (RBD), SEQ ID NO: 181 ((RBD)₂), SEQ ID NO: 183 ((CTD_short_d)₂), SEQ ID NO: 185 ((CTD_short_i)₂), SEQ ID NO: 187 ((CTD_short_i)₂-mod. 1), SEQ ID NO: 189 ((CTD_short_i)₂-mod. 2), SEQ ID NO: 191 ((CTD_short_i)₂-mod. 3), SEQ ID NO: 199 (SARS-2003, SARS_short_h), SEQ ID NO: 201 (SARS-2003, SARS_short_i), SEQ ID NO: 203 (MERS_Lytic_a), SEQ ID NO: 205 (MERS_Lytic_b), SEQ ID NO: 207 (MERS_Lytic_c), SEQ ID NO: 209 (MERS_Lytic_d), SEQ ID NO: 211 (MERS_Lytic_e), SEQ ID NO: 213 (MERS_Lytic_f), SEQ ID NO: 215 (MERS_Lytic_g), and SEQ ID NOs: 705-716. In some embodiments, an immunogenic fragment comprises, consists of, or consists essentially of an amino acid sequence with at least 90%, preferably at least 91%, 92%, 93%, 94%, 95%, 96%, 97%, 98%, or 99%, sequence identity to an amino acid sequence selected from the group consisting of SEQ ID NO: 185 ((CTD_short_i)₂), SEQ ID NO: 187 ((CTD_short_i)₂-mod. 1), SEQ ID NO: 189 ((CTD_short_i)₂-mod. 2), and SEQ ID NO: 191 ((CTD_short_i)₂-mod. 3). In further embodiments, an immunogenic fragment comprises, consists of, or consists essentially of an amino acid sequence with at least 90%, preferably at least 91%, 92%, 93%, 94%, 95%, 96%, 97%, 98%, or 99%, sequence identity to the amino acid sequence of SEQ ID NO: 185 ((CTD_short_i)₂). In further embodiments, an immunogenic fragment comprises, consists of, or consists essentially of an amino acid sequence with at least 90%, preferably at least 91%, 92%, 93%, 94%, 95%, 96%, 97%, 98%, or 99%, sequence identity to an amino acid sequence selected from the group consisting of SEQ ID NO: 183 ((CTD_short_d)₂), SEQ ID NO: 39 (CTD_short_i), SEQ ID NO: 29 (CTD_short_d), SEQ ID NO: 31 (CTD_short_e), SEQ ID NO: 37 (CTD_short_h), and SEQ ID NO: 23 (CTD_short_a). In some embodiments, an immunogenic fragment comprises, consists of, or consists essentially of an amino acid sequence with at least 90%, preferably at least 91%, 92%, 93%, 94%, 95%, 96%, 97%, 98%, or 99%, sequence identity to the amino acid sequence represented by SEQ ID NO: 39. In some embodiments, an immunogenic fragment comprises, consists of, or consists essentially of an amino acid sequence with at least 90%, preferably at least 91%, 92%, 93%, 94%, 95%, 96%, 97%, 98%, or 99%, sequence identity to the amino acid sequence represented by SEQ ID NO: 185. In some embodiments, an immunogenic fragment comprises, consists of, or consists essentially of an amino acid sequence with at least 90%, preferably at least 91%, 92%, 93%, 94%, 95%, 96%, 97%, 98%, or 99%, sequence identity to the amino acid sequence represented by SEQ ID NO: 190. In some embodiments, an immunogenic fragment comprises, consists of, or consists essentially of an amino acid sequence with at least 90%, preferably at least 91%, 92%, 93%, 94%, 95%, 96%, 97%, 98%, or 99%, sequence identity to an amino acid sequence selected from the group consisting of SEQ ID NOs: 705-716.

[0026] In some embodiments, an immunogenic fragment comprises, consists of, or consists essentially of an amino acid sequence with at least 90%, preferably at least 91%, 92%, 93%, 94%, 95%, 96%, 97%, 98%, or 99%, sequence identity to an amino acid sequence selected from the group consisting of SEQ ID NO: 245 (CTD_short_h) 2), SEQ ID NO: 249 (LS2435 Single domain_(GAMMA-Plus)), SEQ ID NO: 253 (BETA_CTD_short_i), SEQ ID NO: 257 (GAMMA_CTD_short_i), SEQ ID NO: 261 (GAMMA_CTD_short_i), SEQ ID NO: 265 (DELTA-Plus_CTD_short_i), SEQ ID NO: 269 (MU_CTD_short_i), SEQ ID NO: 273 (A.30_CTD_short_i), SEQ ID NO: 277 (DELTA-Plus+MU_CTD_short_i), SEQ ID NO: 281 (DELTA-Plus+A.30_CTD_short_i), SEQ ID NO: 285 (BETA_CTD_short_i)₂), SEQ ID NO: 289 ((GAMMA_CTD_short_i)₂), SEQ ID NO: 293 ((DELTA_CTD_short_i)₂), SEQ ID NO: 297 ((DELTA-Plus_CTD_short_i)₂), SEQ ID NO: 301 ((MU_CTD_short_i)₂), SEQ ID NO: 305 ((A.30_CTD_short_i)₂), SEQ ID NO: 309 ((DELTA-Plus+MU_CTD_short_i)₂), SEQ ID NO: 313 ((DELTA-Plus+A.30_CTD_short_i)₂), SEQ ID NO: 317 (Omicron_Boost_CTD_short_i), SEQ ID NO: 321 ((Omicron_Boost_CTD_short_i)₂), SEQ ID NO: 325 (Omicron_CTD_short_i), SEQ ID NO: 329 ((Omicron_CTD_short_i)₂), SEQ ID NO: 333 (OΔ+μ_1_CTD_short_i), SEQ ID NO: 337 ((Δ+μ_1_CTD_short_i)₂), SEQ ID NO: 341 (Δ+μ_2_CTD_short_i), SEQ ID NO: 345 ((OΔ+μ_2_CTD_short_i)₂), SEQ ID NO: 349 (OΔ+μ_3_CTD_short_i), SEQ ID NO: 353 ((Δ+μ_3_CTD_short_i)₂), SEQ ID NO: 357 (Δ+μ_3_CTD_short_i), SEQ ID NO: 361 ((OΔ+μ_4_CTD_short_i)₂), SEQ ID NO: 365 (CTD-gCd01), SEQ ID NO: 366 (CTD-gCd02), SEQ ID NO: 367 (CTD-gCd03), SEQ ID NO: 368 (CTD-gCd04), SEQ ID NO: 369 (CTD-gCd05), SEQ ID NO: 370 (CTD-gCd06), SEQ ID NO: 371 (CTD-gCd07), SEQ ID NO: 372 (CTD-gCd08), SEQ ID NO: 373 (CTD-gCd09), SEQ ID NO: 374 (CTD-gCd10), SEQ ID NO: 375 (CTD-gCd11), SEQ ID NO: 376 (CTD-gCd12), SEQ ID NO: 377 (CTD-gCd13), SEQ ID NO: 378 (CTD-gCd14), SEQ ID NO: 379 (CTD-gCd15), SEQ ID NO: 380 (CTD-gCd16), SEQ ID NO: 381 (CTD-gCd17), SEQ ID NO: 382 (CTD-gCd18), SEQ ID NO: 383 (CTD-gCd19), SEQ ID NO: 384 (CTD-gCd20), SEQ ID NO: 385 (CTD-gCd21), SEQ ID NO: 386 (CTD-gCd22), SEQ ID NO: 387 (CTD-gCd23), SEQ ID NO: 388 (CTD-gCd24), SEQ ID NO: 389 (CTD-gCd25), SEQ ID NO: 390 (CTD-gCd26), SEQ ID NO: 391 (CTD-gCd27), SEQ ID NO: 392 (CTD-gCd28), SEQ ID NO: 393 (CTD-gCd29), SEQ ID NO: 394 (CTD-gCd30), SEQ ID NO: 395 (CTD-gCd31), SEQ ID NO: 396 (CTD-gCd32), SEQ ID NO: 397 (CTD-gCd33), SEQ ID NO: 398 (CTD-gCd34), SEQ ID NO: 399 (CTD-gCd35), SEQ ID NO: 400 (CTD-gCd36), SEQ ID NO: 401 (CTD-gCd37), SEQ ID NO: 402 (CTD-gCd38), SEQ ID NO: 403 (CTD-gN01), SEQ ID NO: 404 (CTD-gN02), SEQ ID NO: 405 (CTD-gN03), SEQ ID NO: 406 (CTD-gN04), SEQ ID NO: 407 (CTD-gN05), SEQ ID NO: 408 (CTD-gN06), SEQ ID NO: 409 (CTD-gN07), SEQ ID NO: 410 (CTD-gN08), SEQ ID NO: 411 (CTD-gN09), SEQ ID NO: 412 (CTD-gN10), SEQ ID NO: 413 (CTD-gN11), SEQ ID NO: 414 (CTD-gN12), SEQ ID NO: 415 (CTD-gN13) SEQ ID NO: 416 (CTD-gN14), SEQ ID NO: 417 (CTD-gN15), SEQ ID NO: 418 (CTD-gN16), SEQ ID NO: 419 (CTD-gN17), SEQ ID NO: 420 (CTD-gN18), SEQ ID NO: 421 (CTD-gN19), SEQ ID NO: 422 (CTD-gN20), SEQ ID NO: 423 (CTD-gN21), SEQ ID NO: 424 (CTD-gN22), SEQ ID NO: 425 (CTD-gN23), SEQ ID NO: 426 (CTD-gN24), SEQ ID NO: 427 (CTD-gN25), SEQ ID NO: 428 (CTD-gN26), SEQ ID NO: 429 (CTD-gN27), SEQ ID NO: 430 (CTD-gN28), SEQ ID NO: 431 (CTD-gN29), SEQ ID NO: 432 (CTD-gN30), SEQ ID NO: 433 (CTD-gN31), SEQ ID NO: 434 (CTD-gN32), SEQ ID NO: 435 (CTD-gN33), SEQ ID NO: 436 (CTD-gN34), SEQ ID NO: 437 (CTD-gN35), SEQ ID NO: 438 (CTD-gN36), SEQ ID NO: 439 (CTD-gN37), SEQ ID NO: 440 (CTD-gN38), SEQ ID NO: 441 (CTD-gN39), SEQ ID NO: 442 (CTD-gN40), SEQ ID NO: 443 (CTD-gN41), SEQ ID NO: 444 (CTD-gN42), SEQ ID NO: 445 (CTD-gN43), SEQ ID NO: 446 (CTD-gN44), SEQ ID NO: 447 (CTD-gN45), SEQ ID NO: 448 (CTD-gN46), SEQ ID NO: 449 (CTD-gN47), and SEQ ID NOs: 705-716.

[0027] In some embodiments, an immunogenic fragment comprises, consists of, or consists essentially of an amino acid sequence with at least 90%, preferably at least 91%, 92%, 93%, 94%, 95%, 96%, 97%, 98%, or 99%, sequence identity to an amino acid sequence selected from the group consisting of SEQ ID NO: 277 (DELTA-Plus+MU_CTD_short_i), SEQ ID NO: 281 (DELTA-Plus+A.30_CTD_short_i), SEQ ID NO: 309 ((DELTA-Plus+MU_CTD_short_i)₂), SEQ ID NO: 313 ((DELTA-Plus+A.30_CTD_short_i)₂), SEQ ID NO: 333 (Δ+μ_1_CTD_short_i), SEQ ID NO: 337 ((Δ+μ_1_CTD_short_i)₂, and SEQ ID NOs: 705-716. In some embodiments, an immunogenic fragment comprises, consists of, or consists essentially of an amino acid sequence with at least 90%, preferably at least 91%, 92%, 93%, 94%, 95%, 96%, 97%, 98%, or 99%, sequence identity to an amino acid sequence selected from the group consisting of SEQ ID NOs: 705-716.

[0028] In some embodiments, the recombinant polypeptide comprises at least one immunogenic fragment that comprises, consists of, or consists essentially of an amino acid sequence selected from the group consisting of SEQ ID NOS: 1, 3, 5, 7, 9, 11, 13, 15, 17, 19, 21, 23, 25, 27, 29, 31, 33, 35, 37, 39, 41, 43, 45, 47, 49, 51, 53, 55, 57, 59, 61, 63, 171, 173, 175, 177, 179, 181, 183, 185, 187, 189, 191, 199, 201, 203, 205, 207, 209, 211, 213, 215, and 705-716. In some embodiments, an immunogenic fragment comprises, consists of, or consists essentially of an amino acid sequence selected from the group consisting of SEQ ID NO: 185 ((CTD_short_i)₂), SEQ ID NO: 187 ((CTD_short_i)₂-mod. 1), SEQ ID NO: 189 ((CTD_short_i)₂-mod. 2), and SEQ ID NO: 191 ((CTD_short_i)₂-mod. 3). In an embodiment, an immunogenic fragment comprises, consists of, or consists essentially of the amino acid sequence represented by SEQ ID NO: 185. In an embodiment, an immunogenic fragment comprises, consists of, or consists essentially of the amino acid sequence represented by SEQ ID NO: 191. In further embodiments an immunogenic fragment comprises, consists of, or consists essentially of the amino acid sequence of SEQ ID NO: 185 ((CTD_short_i)₂). In further embodiments, an immunogenic fragment comprises, consists of, or consists essentially of an amino acid sequence selected from the group consisting of SEQ ID NO: 183 ((CTD_short_d)₂), SEQ ID NO: 39 (CTD_short_i), SEQ ID NO: 29 (CTD_short_d), SEQ ID NO: 31 (CTD_short_e), SEQ ID NO: 37 (CTD_short_h), and SEQ ID NO: 23 (CTD_short_a). In further embodiments, an immunogenic fragment comprises, consists of, or consists essentially of an amino acid sequence selected from the group consisting of SEQ ID NOs: 705-716.

[0029] In some embodiments, the recombinant polypeptide comprises, consists of, or consists essentially of at least one immunogenic fragment that comprises, consists of, or consists essentially of an amino acid sequence selected from the group consisting of SEQ ID NOS: 245, 249, 253, 257, 261, 265, 269, 273, 277, 281, 285, 289, 293, 297, 301, 305, 309, 313, 317, 321, 325, 329, 333, 337, 341, 345, 349, 353, 357, 361, and 365-449. In some embodiments, the recombinant polypeptide comprises, consists of, or consists essentially of at least one immunogenic fragment that comprises, consists of, or consists essentially of an amino acid sequence selected from the group consisting of SEQ ID NOs: 277, 281, 309, 313, 333, and 337.

[0030] In some embodiments, the recombinant polypeptide comprises at least one immunogenic fragment that is encoded by a nucleotide sequence that comprises, consists of, or consists essentially of a nucleotide sequence selected from the group consisting of SEQ ID NOs: 2, 4, 6, 8, 10, 12, 14, 16, 18, 20, 22, 24, 26, 28, 30, 32, 34, 36, 38, 40, 42, 44, 46, 48, 50, 52, 54, 56, 58, 60, 62, 64, 172, 174, 176, 178, 180, 182, 184, 186, 188, 190, 192, 200, 202, 204, 206, 208, 210, 212, 214, 216, and 717-728. In some embodiments, the recombinant polypeptide comprises, consists of, or consists essentially of at least one immunogenic fragment that is encoded by a nucleotide sequence that comprises, consists of, or consists essentially of a nucleotide sequence selected from the group consisting of SEQ ID NOs: 246, 250, 254, 258, 262, 266, 270, 274, 278, 282, 286, 290, 294, 298, 302, 306, 310, 314, 318, 322, 326, 330, 334, 338, 342, 346, 350, 354, 358, 362, and 450-534. In some embodiments, the recombinant polypeptide comprises at least one immunogenic fragment that is encoded by a nucleotide sequence that comprises, consists of, or consists essentially of a nucleotide sequence selected from the group consisting of SEQ ID NOs: 278, 282, 310, 314, 334, and 338. In some embodiments, the recombinant polypeptide comprises at least one immunogenic fragment that is encoded by a nucleotide sequence that comprises, consists of, or consists essentially of a nucleotide sequence selected from the group consisting of SEQ ID NOs: 717-728.

[0031] In some embodiments, the recombinant polypeptide includes at least two immunogenic fragments. For example, the recombinant polypeptide can include two, three, four, five, six, seven, eight, nine, ten, or more immunogenic fragments. In some embodiments, the recombinant polypeptide includes at least three immunogenic fragments. In some embodiments, the recombinant polypeptide includes at least three immunogenic fragments, of which at least one is a SARS-COV-2 spike glycoprotein fragment as described herein, at least one is a SARS-CoV spike glycoprotein fragment as described herein, and at least one is a MERS-COV spike glycoprotein fragment as described herein. In some embodiments, the recombinant polypeptide includes at least three immunogenic fragments, of which at least one is a SARS-COV-2 spike glycoprotein fragment, wherein the SARS-COV-2 fragment comprises, consists of, or consists essentially of an amino acid sequence with at least 90%, preferably at least 91%, 92%, 93%, 94%, 95%, 96%, 97%, 98%, or 99%, sequence identity to an amino acid sequence selected from the group consisting of SEQ ID NO: 1 (CTD_long_a), SEQ ID NO: 3 (CTD_long_a_D614G), SEQ ID NO: 5 (CTD_long_a-Dimer), SEQ ID NO: 7 (CTD_long_b), SEQ ID NO: 9 (CTD_long_c), SEQ ID NO: 11 (CTD_long_d), SEQ ID NO: 13 (CTD_long_e), SEQ ID NO: 15 (CTD_long_f), SEQ ID NO: 17 (CTD_long_g), SEQ ID NO: 19 (CTD_long_h), SEQ ID NO: 21 (CTD_long_i), SEQ ID NO: 23 (CTD_short_a), SEQ ID NO: 25 (CTD_short_b), SEQ ID NO: 27 (CTD_short_c), SEQ ID NO: 29 (CTD_short_d), SEQ ID NO: 31 (CTD_short_e), SEQ ID NO: 33 (CTD_short_f), SEQ ID NO: 35 (CTD_short_g), SEQ ID NO: 37 (CTD_short_h), SEQ ID NO: 39 (CTD_short_i), SEQ ID NO: 41 (CTD_vs_a), SEQ ID NO: 43 (CTD_vs_b), SEQ ID NO: 45 (CTD_vs_c), SEQ ID NO: 47 (CTD_vs_d), SEQ ID NO: 49 (CTD_vs_e), SEQ ID NO: 51 (RBD_a), SEQ ID NO: 53 (RBD_b), SEQ ID NO: 55 (RBD_c), SEQ ID NO: 57 (RBD_d), SEQ ID NO: 59 (RBD_e), SEQ ID NO: 61 (NTD_long_a), SEQ ID NO: 63 (NTD_short_a), SEQ ID NO: 171 (RBD-tight), SEQ ID NO: 173 ((RBD-tight)₂), SEQ ID NO: 175 (RBD-extended), SEQ ID NO: 177 ((RBD-extended)₂), SEQ ID NO: 179 (RBD), SEQ ID NO: 181 ((RBD)₂), SEQ ID NO: 183 ((CTD_short_d)₂), SEQ ID NO: 185 ((CTD_short_i)₂), SEQ ID NO: 187 ((CTD_short_i)₂-mod. 1), SEQ ID NO: 189 ((CTD_short_i)₂-mod. 2), SEQ ID NO: 191 ((CTD_short_i)₂-mod. 3), and SEQ ID NOs: 705-716; at least one is a SARS-COV spike glycoprotein fragment, wherein the SARS-COV fragment comprises, consists of, or consists essentially of an amino acid sequence with at least 90%, preferably at least 91%, 92%, 93%, 94%, 95%, 96%, 97%, 98%, or 99%, sequence identity to an amino acid sequence represented by SEQ ID NO: 199 (SARS-2003, SARS_short_h), or SEQ ID NO: 201 (SARS-2003, SARS_short_i); and at least one is a MERS-COV spike glycoprotein fragment, wherein the MERS-COV fragment comprises, consists of, or consists essentially of an amino acid sequence with at least 90%, preferably at least 91%, 92%, 93%, 94%, 95%, 96%, 97%, 98%, or 99%, sequence identity to an amino acid sequence selected from the group consisting of SEQ ID NO: 203 (MERS_Lytic_a), SEQ ID NO: 205 (MERS_Lytic_b), SEQ ID NO: 207 (MERS_Lytic_c), SEQ ID NO: 209 (MERS_Lytic_d), SEQ ID NO: 211 (MERS_Lytic_e), SEQ ID NO: 213 (MERS_Lytic_f), and SEQ ID NO: 215 (MERS_Lytic_g).

[0032] In some embodiments, the recombinant polypeptide comprises, consists of, or consists essentially of at least three immunogenic fragments, of which at least one is a SARS-CoV-2 spike glycoprotein fragment, wherein the SARS-COV-2 fragment comprises, consists of, or consists essentially of an amino acid sequence with at least 90%, preferably at least 91%, 92%, 93%, 94%, 95%, 96%, 97%, 98%, or 99%, sequence identity to an amino acid sequence selected from the group consisting of SEQ ID NO: 245 (CTD_short_h) 2), SEQ ID NO: 249 (LS2435 Single domain_(GAMMA-Plus)), SEQ ID NO: 253 (BETA_CTD_short_i), SEQ ID NO: 257 (GAMMA_CTD_short_i), SEQ ID NO: 261 (GAMMA_CTD_short_i), SEQ ID NO: 265 (DELTA-Plus_CTD_short_i), SEQ ID NO: 269 (MU_CTD_short_i), SEQ ID NO: 273 (A.30_CTD_short_i), SEQ ID NO: 277 (DELTA-Plus+MU_CTD_short_i), SEQ ID NO: 281 (DELTA-Plus+A.30_CTD_short_i), SEQ ID NO: 285 (BETA_CTD_short_i)₂), SEQ ID NO: 289 ((GAMMA_CTD_short_i)₂), SEQ ID NO: 293 ((DELTA_CTD_short_i)₂), SEQ ID NO: 297 ((DELTA-Plus_CTD_short_i)₂), SEQ ID NO: 301 ((MU_CTD_short_i)₂), SEQ ID NO: 305 ((A.30_CTD_short_i)₂), SEQ ID NO: 309 ((DELTA-Plus+MU_CTD_short_i)₂), SEQ ID NO: 313 ((DELTA-Plus+A.30_CTD_short_i)₂), SEQ ID NO: 317 (Omicron_Boost_CTD_short_i), SEQ ID NO: 321 ((Omicron_Boost_CTD_short_i)₂), SEQ ID NO: 325 (Omicron_CTD_short_i), SEQ ID NO: 329 ((Omicron_CTD_short_i)₂), SEQ ID NO: 333 (OΔ+μ_1_CTD_short_i), SEQ ID NO: 337 ((OΔ+μ_1_CTD_short_i)₂), SEQ ID NO: 341 (OΔ+μ_2_CTD_short_i), SEQ ID NO: 345 ((OΔ+μ_2_CTD_short_i)₂), SEQ ID NO: 349 (OΔ+μ_3_CTD_short_i), SEQ ID NO: 353 ((Δ+μ_3_CTD_short_i)₂), SEQ ID NO: 357 (Δ+μ_4_CTD_short_i), SEQ ID NO: 361 ((OΔ+μ_4_CTD_short_i)₂), SEQ ID NO: 365 (CTD-gCd01), SEQ ID NO: 366 (CTD-gCd02), SEQ ID NO: 367 (CTD-gCd03), SEQ ID NO: 368 (CTD-gCd04), SEQ ID NO: 369 (CTD-gCd05), SEQ ID NO: 370 (CTD-gCd06), SEQ ID NO: 371 (CTD-gCd07), SEQ ID NO: 372 (CTD-gCd08), SEQ ID NO: 373 (CTD-gCd09), SEQ ID NO: 374 (CTD-gCd10), SEQ ID NO: 375 (CTD-gCd11), SEQ ID NO: 376 (CTD-gCd12), SEQ ID NO: 377 (CTD-gCd13), SEQ ID NO: 378 (CTD-gCd14), SEQ ID NO: 379 (CTD-gCd15), SEQ ID NO: 380 (CTD-gCd16), SEQ ID NO: 381 (CTD-gCd17), SEQ ID NO: 382 (CTD-gCd18), SEQ ID NO: 383 (CTD-gCd19), SEQ ID NO: 384 (CTD-gCd20), SEQ ID NO: 385 (CTD-gCd21), SEQ ID NO: 386 (CTD-gCd22), SEQ ID NO: 387 (CTD-gCd23), SEQ ID NO: 388 (CTD-gCd24), SEQ ID NO: 389 (CTD-gCd25), SEQ ID NO: 390 (CTD-gCd26), SEQ ID NO: 391 (CTD-gCd27), SEQ ID NO: 392 (CTD-gCd28), SEQ ID NO: 393 (CTD-gCd29), SEQ ID NO: 394 (CTD-gCd30), SEQ ID NO: 395 (CTD-gCd31), SEQ ID NO: 396 (CTD-gCd32), SEQ ID NO: 397 (CTD-gCd33), SEQ ID NO: 398 (CTD-gCd34), SEQ ID NO: 399 (CTD-gCd35), SEQ ID NO: 400 (CTD-gCd36), SEQ ID NO: 401 (CTD-gCd37), SEQ ID NO: 402 (CTD-gCd38), SEQ ID NO: 403 (CTD-gN01), SEQ ID NO: 404 (CTD-gN02), SEQ ID NO: 405 (CTD-gN03), SEQ ID NO: 406 (CTD-gN04), SEQ ID NO: 407 (CTD-gN05), SEQ ID NO: 408 (CTD-gN06), SEQ ID NO: 409 (CTD-gN07), SEQ ID NO: 410 (CTD-gN08), SEQ ID NO: 411 (CTD-gN09), SEQ ID NO: 412 (CTD-gN10), SEQ ID NO: 413 (CTD-gN11), SEQ ID NO: 414 (CTD-gN12), SEQ ID NO: 415 (CTD-gN13) SEQ ID NO: 416 (CTD-gN14), SEQ ID NO: 417 (CTD-gN15), SEQ ID NO: 418 (CTD-gN16), SEQ ID NO: 419 (CTD-gN17), SEQ ID NO: 420 (CTD-gN18), SEQ ID NO: 421 (CTD-gN19), SEQ ID NO: 422 (CTD-gN20), SEQ ID NO: 423 (CTD-gN21), SEQ ID NO: 424 (CTD-gN22), SEQ ID NO: 425 (CTD-gN23), SEQ ID NO: 426 (CTD-gN24), SEQ ID NO: 427 (CTD-gN25), SEQ ID NO: 428 (CTD-gN26), SEQ ID NO: 429 (CTD-gN27), SEQ ID NO: 430 (CTD-gN28), SEQ ID NO: 431 (CTD-gN29), SEQ ID NO: 432 (CTD-gN30), SEQ ID NO: 433 (CTD-gN31), SEQ ID NO: 434 (CTD-gN32), SEQ ID NO: 435 (CTD-gN33), SEQ ID NO: 436 (CTD-gN34), SEQ ID NO: 437 (CTD-gN35), SEQ ID NO: 438 (CTD-gN36), SEQ ID NO: 439 (CTD-gN37), SEQ ID NO: 440 (CTD-gN38), SEQ ID NO: 441 (CTD-gN39), SEQ ID NO: 442 (CTD-gN40), SEQ ID NO: 443 (CTD-gN41), SEQ ID NO: 444 (CTD-gN42), SEQ ID NO: 445 (CTD-gN43), SEQ ID NO: 446 (CTD-gN44), SEQ ID NO: 447 (CTD-gN45), SEQ ID NO: 448 (CTD-gN46), SEQ ID NO: 449 (CTD-gN47), and SEQ ID NOs: 705-716; at least one is a SARS-COV spike glycoprotein fragment, wherein the SARS-COV fragment comprises, consists of, or consists essentially of an amino acid sequence with at least 90%, preferably at least 91%, 92%, 93%, 94%, 95%, 96%, 97%, 98%, or 99%, sequence identity to an amino acid sequence represented by SEQ ID NO: 199 (SARS-2003, SARS_short_h), or SEQ ID NO: 201 (SARS-2003, SARS_short_i); and at least one is a MERS-COV spike glycoprotein fragment, wherein the MERS-COV fragment comprises, consists of, or consists essentially of an amino acid sequence with at least 90%, preferably at least 91%, 92%, 93%, 94%, 95%, 96%, 97%, 98%, or 99%, sequence identity to an amino acid sequence selected from the group consisting of SEQ ID NO: 203 (MERS_Lytic_a), SEQ ID NO: 205 (MERS_Lytic_b), SEQ ID NO: 207 (MERS_Lytic_c), SEQ ID NO: 209 (MERS_Lytic_d), SEQ ID NO: 211 (MERS_Lytic_e), SEQ ID NO: 213 (MERS_Lytic_f), and SEQ ID NO: 215 (MERS_Lytic_g), wherein the wherein the SARS-COV-2 fragment preferably comprises, consists of, or consists essentially of an amino acid sequence with at least 90%, preferably at least 91%, 92%, 93%, 94%, 95%, 96%, 97%, 98%, or 99%, sequence identity to an amino acid sequence selected from the group consisting of SEQ ID NOs: 277, 281, 309, 313, 333, and 337.

[0033] In some embodiments, the recombinant polypeptide includes at least two immunogenic fragments, wherein each of the at least two immunogenic fragments comprises, consists of, or consists essentially of, an amino acid sequence with at least 90%, preferably at least 91%, 92%, 93%, 94%, 95%, 96%, 97%, 98%, or 99%, sequence identity to an amino acid sequence independently selected from the group consisting of SEQ ID NO: 1 (CTD_long_a), SEQ ID NO: 3 (CTD_long_a_D614G), SEQ ID NO: 5 (CTD_long_a-Dimer), SEQ ID NO: 7 (CTD_long_b), SEQ ID NO: 9 (CTD_long_c), SEQ ID NO: 11 (CTD_long_d), SEQ ID NO: 13 (CTD_long_e), SEQ ID NO: 15 (CTD_long_f), SEQ ID NO: 17 (CTD_long_g), SEQ ID NO: 19 (CTD_long_h), SEQ ID NO: 21 (CTD_long_i), SEQ ID NO: 23 (CTD_short_a), SEQ ID NO: 25 (CTD_short_b), SEQ ID NO: 27 (CTD_short_c), SEQ ID NO: 29 (CTD_short_d), SEQ ID NO: 31 (CTD_short_e), SEQ ID NO: 33 (CTD_short_f), SEQ ID NO: 35 (CTD_short_g), SEQ ID NO: 37 (CTD_short_h), SEQ ID NO: 39 (CTD_short_i), SEQ ID NO: 41 (CTD_vs_a), SEQ ID NO: 43 (CTD_vs_b), SEQ ID NO: 45 (CTD_vs_c), SEQ ID NO: 47 (CTD_vs_d), SEQ ID NO: 49 (CTD_vs_e), SEQ ID NO: 51 (RBD_a), SEQ ID NO: 53 (RBD_b), SEQ ID NO: 55 (RBD_c), SEQ ID NO: 57 (RBD_d), SEQ ID NO: 59 (RBD_e), SEQ ID NO: 61 (NTD_long_a), SEQ ID NO: 63 (NTD_short_a), SEQ ID NO: 171 (RBD-tight), SEQ ID NO: 173 ((RBD-tight)₂), SEQ ID NO: 175 (RBD-extended), SEQ ID NO: 177 ((RBD-extended)₂), SEQ ID NO: 179 (RBD), SEQ ID NO: 181 ((RBD)₂), SEQ ID NO: 183 ((CTD_short_d)₂), SEQ ID NO: 185 ((CTD_short_i)₂), SEQ ID NO: 187 ((CTD_short_i)₂-mod. 1), SEQ ID NO: 189 ((CTD_short_i)₂-mod. 2), SEQ ID NO: 191 ((CTD_short_i)₂-mod. 3) and SEQ ID NOs: 705-716. In some embodiments, each of the at least two immunogenic fragments comprises, consists of, or consists essentially of an amino acid sequence with at least 90%, preferably at least 91%, 92%, 93%, 94%, 95%, 96%, 97%, 98%, or 99%, sequence identity to an amino acid sequence independently selected from the group consisting of SEQ ID NO: 183 ((CTD_short_d)₂), SEQ ID NO: 39 (CTD_short_i), SEQ ID NO: 29 (CTD_short_d), SEQ ID NO: 31 (CTD_short_e), SEQ ID NO: 37 (CTD_short_h), and SEQ ID NO: 23 (CTD_short_a). In some embodiments, each of the at least two immunogenic fragments comprises, consists of, or consists essentially of an amino acid sequence with at least 90%, preferably at least 91%, 92%, 93%, 94%, 95%, 96%, 97%, 98%, or 99%, sequence identity to the amino acid sequence of SEQ ID NO: 39 (CTD_short_i). In further embodiments, each of the at least two immunogenic fragments comprises, consists of, or consists essentially of an amino acid sequence independently selected from the group consisting of SEQ ID NO: 183 ((CTD_short_d)₂), SEQ ID NO: 39 (CTD_short_i), SEQ ID NO: 29 (CTD_short_d), SEQ ID NO: 31 (CTD_short_e), SEQ ID NO: 37 (CTD_short_h), and SEQ ID NO: 23 (CTD_short_a). In further embodiments, each of the at least two immunogenic fragments comprises, consists of, or consists essentially of the amino acid sequence of SEQ ID NO: 39 (CTD_short_i). In further embodiments, each of the at least two immunogenic fragments comprises, consists of, or consists essentially of an amino acid sequence independently selected from the group consisting of SEQ ID NOs: 705-716.

[0034] In some embodiments, the recombinant polypeptide includes at least two immunogenic fragments, wherein each of the at least two immunogenic fragments comprises, consists of, or consists essentially of, an amino acid sequence with at least 90%, preferably at least 91%, 92%, 93%, 94%, 95%, 96%, 97%, 98%, or 99%, sequence identity to an amino acid sequence independently selected from the group consisting of SEQ ID NO: 245 (CTD_short_h) 2), SEQ ID NO: 249 (LS2435 Single domain_(GAMMA-Plus)), SEQ ID NO: 253 (BETA_CTD_short_i), SEQ ID NO: 257 (GAMMA_CTD_short_i), SEQ ID NO: 261 (GAMMA_CTD_short_i), SEQ ID NO: 265 (DELTA-Plus_CTD_short_i), SEQ ID NO: 269 (MU_CTD_short_i), SEQ ID NO: 273 (A.30_CTD_short_i), SEQ ID NO: 277 (DELTA-Plus+MU_CTD_short_i), SEQ ID NO: 281 (DELTA-Plus+A.30_CTD_short_i), SEQ ID NO: 285 (BETA_CTD_short_i)₂), SEQ ID NO: 289 ((GAMMA_CTD_short_i)₂), SEQ ID NO: 293 ((DELTA_CTD_short_i)₂), SEQ ID NO: 297 ((DELTA-Plus_CTD_short_i)₂), SEQ ID NO: 301 ((MU_CTD_short_i)₂), SEQ ID NO: 305 ((A.30_CTD_short_i)₂), SEQ ID NO: 309 ((DELTA-Plus+MU_CTD_short_i)₂), SEQ ID NO: 313 ((DELTA-Plus+A.30_CTD_short_i)₂), SEQ ID NO: 317 (Omicron_Boost_CTD_short_i), SEQ ID NO: 321 ((Omicron_Boost_CTD_short_i)₂), SEQ ID NO: 325 (Omicron_CTD_short_i), SEQ ID NO: 329 ((Omicron_CTD_short_i)₂), SEQ ID NO: 333 (OΔ+μ_1_CTD_short_i), SEQ ID NO: 337 ((OΔ+μ_1_CTD_short_i)₂), SEQ ID NO: 341 (Δ+μ_2_CTD_short_i), SEQ ID NO: 345 ((Δ+μ_3_CTD_short_i)₂), SEQ ID NO: 349 (OΔ+μ_3_CTD_short_i), SEQ ID NO: 353 ((OΔ+μ_3_CTD_short_i)₂), SEQ ID NO: 357 (OΔ+μ_4_CTD_short_i), SEQ ID NO: 361 ((OΔ+μ_4_CTD_short_i)₂), SEQ ID NO: 365 (CTD-gCd01), SEQ ID NO: 366 (CTD-gCd02), SEQ ID NO: 367 (CTD-gCd03), SEQ ID NO: 368 (CTD-gCd04), SEQ ID NO: 369 (CTD-gCd05), SEQ ID NO: 370 (CTD-gCd06), SEQ ID NO: 371 (CTD-gCd07), SEQ ID NO: 372 (CTD-gCd08), SEQ ID NO: 373 (CTD-gCd09), SEQ ID NO: 374 (CTD-gCd10), SEQ ID NO: 375 (CTD-gCd11), SEQ ID NO: 376 (CTD-gCd12), SEQ ID NO: 377 (CTD-gCd13), SEQ ID NO: 378 (CTD-gCd14), SEQ ID NO: 379 (CTD-gCd15), SEQ ID NO: 380 (CTD-gCd16), SEQ ID NO: 381 (CTD-gCd17), SEQ ID NO: 382 (CTD-gCd18), SEQ ID NO: 383 (CTD-gCd19), SEQ ID NO: 384 (CTD-gCd20), SEQ ID NO: 385 (CTD-gCd21), SEQ ID NO: 386 (CTD-gCd22), SEQ ID NO: 387 (CTD-gCd23), SEQ ID NO: 388 (CTD-gCd24), SEQ ID NO: 389 (CTD-gCd25), SEQ ID NO: 390 (CTD-gCd26), SEQ ID NO: 391 (CTD-gCd27), SEQ ID NO: 392 (CTD-gCd28), SEQ ID NO: 393 (CTD-gCd29), SEQ ID NO: 394 (CTD-gCd30), SEQ ID NO: 395 (CTD-gCd31), SEQ ID NO: 396 (CTD-gCd32), SEQ ID NO: 397 (CTD-gCd33), SEQ ID NO: 398 (CTD-gCd34), SEQ ID NO: 399 (CTD-gCd35), SEQ ID NO: 400 (CTD-gCd36), SEQ ID NO: 401 (CTD-gCd37), SEQ ID NO: 402 (CTD-gCd38), SEQ ID NO: 403 (CTD-gN01), SEQ ID NO: 404 (CTD-gN02), SEQ ID NO: 405 (CTD-gN03), SEQ ID NO: 406 (CTD-gN04), SEQ ID NO: 407 (CTD-gN05), SEQ ID NO: 408 (CTD-gN06), SEQ ID NO: 409 (CTD-gN07), SEQ ID NO: 410 (CTD-gN08), SEQ ID NO: 411 (CTD-gN09), SEQ ID NO: 412 (CTD-gN10), SEQ ID NO: 413 (CTD-gN11), SEQ ID NO: 414 (CTD-gN12), SEQ ID NO: 415 (CTD-gN13) SEQ ID NO: 416 (CTD-gN14), SEQ ID NO: 417 (CTD-gN15), SEQ ID NO: 418 (CTD-gN16), SEQ ID NO: 419 (CTD-gN17), SEQ ID NO: 420 (CTD-gN18), SEQ ID NO: 421 (CTD-gN19), SEQ ID NO: 422 (CTD-gN20), SEQ ID NO: 423 (CTD-gN21), SEQ ID NO: 424 (CTD-gN22), SEQ ID NO: 425 (CTD-gN23), SEQ ID NO: 426 (CTD-gN24), SEQ ID NO: 427 (CTD-gN25), SEQ ID NO: 428 (CTD-gN26), SEQ ID NO: 429 (CTD-gN27), SEQ ID NO: 430 (CTD-gN28), SEQ ID NO: 431 (CTD-gN29), SEQ ID NO: 432 (CTD-gN30), SEQ ID NO: 433 (CTD-gN31), SEQ ID NO: 434 (CTD-gN32), SEQ ID NO: 435 (CTD-gN33), SEQ ID NO: 436 (CTD-gN34), SEQ ID NO: 437 (CTD-gN35), SEQ ID NO: 438 (CTD-gN36), SEQ ID NO: 439 (CTD-gN37), SEQ ID NO: 440 (CTD-gN38), SEQ ID NO: 441 (CTD-gN39), SEQ ID NO: 442 (CTD-gN40), SEQ ID NO: 443 (CTD-gN41), SEQ ID NO: 444 (CTD-gN42), SEQ ID NO: 445 (CTD-gN43), SEQ ID NO: 446 (CTD-gN44), SEQ ID NO: 447 (CTD-gN45), SEQ ID NO: 448 (CTD-gN46), SEQ ID NO: 449 (CTD-gN47), and SEQ ID NOs: 705-716.

[0035] In some embodiments, the recombinant polypeptide includes at least two immunogenic fragments, wherein each of the at least two immunogenic fragments comprises, consists of, or consists essentially of, an amino acid sequence with at least 90%, preferably at least 91%, 92%, 93%, 94%, 95%, 96%, 97%, 98%, or 99%, sequence identity to an amino acid sequence independently selected from the group consisting of SEQ ID NOs: 277, 281, 309, 313, 333, and 337.

[0036] Nucleotide or amino acid sequence “identity,” as referenced herein, can be determined by comparing a nucleotide or amino acid sequence of interest to a reference nucleotide or amino acid sequence. The percent identity is the number of nucleotides or amino acid residues that are the same (i.e., that are identical) as between the optimally aligned sequence of interest and the reference sequence divided by the length of the longest sequence (i.e., the length of either the sequence of interest or the reference sequence, whichever is longer). Alignment of sequences and calculation of percent identity can be performed using available software programs. Examples of such programs include CLUSTAL-W, T-Coffee, and ALIGN (for alignment of nucleic acid and amino acid sequences), BLAST programs (e.g., BLAST 2.1, BL2SEQ, BLASTp, BLASTn, and the like) and FASTA programs (e.g., FASTA3x, FASTM, and SSEARCH) (for sequence alignment and sequence similarity searches). Sequence alignment algorithms also are disclosed in, for example, Altschul et al., J. Molecular Biol., 215 (3): 403-410 (1990), Beigert et al., Proc. Natl. Acad. Sci. USA, 106 (10): 3770-3775 (2009), Durbin et al., eds., Biological Sequence Analysis: Probalistic Models of Proteins and Nucleic Acids, Cambridge University Press, Cambridge, UK (2009), Soding, Bioinformatics, 21 (7): 951-960 (2005), Altschul et al., Nucleic Acids Res., 25 (17): 3389-3402 (1997), and Gusfield, Algorithms on Strings, Trees and Sequences, Cambridge University Press, Cambridge UK (1997)). Percent (%) identity of sequences can be also calculated, for example, as 100×[(identical positions)/min (TG_{A}, TG_{B})], where TG_{A} and TG_{B} are the sum of the number of residues and internal gap positions in peptide sequences A and B in the alignment that minimizes TG_{A} and TG_{B}. See, e.g., Russell et al., J. Mol Biol., 244:332-350 (1994).

[0037] In some embodiments, the recombinant polypeptide includes a plurality of identical immunogenic fragments. For example, a recombinant polypeptide can include two, three, four, five, six, seven, eight, nine, ten, or more immunogenic fragments, wherein each fragment comprises, consists of, or consists essentially of the same amino acid sequence. In some embodiments, the recombinant polypeptide includes two, three, four or five identical immunogenic fragments. In yet further embodiments, the recombinant polypeptide includes two or three identical immunogenic fragments.

[0038] In some embodiments, the recombinant polypeptide includes a plurality of non-identical immunogenic fragments. For example, a recombinant polypeptide can include two, three, four, five, six, seven, eight, nine, ten, or more immunogenic fragments, wherein each fragment comprises, consists of, or consists essentially of a different amino acid sequence from each other fragment, i.e., each fragment is a different fragment. In some embodiments, the recombinant polypeptide includes two, three, four or five different immunogenic fragments. In yet further embodiments, the recombinant polypeptide includes two or three different immunogenic fragments.

[0039] In some embodiments, the recombinant polypeptide includes a plurality of immunogenic fragments, in which some of the fragments are identical, but not all. For example, a recombinant polypeptide can include two, three, four, five, six, seven, eight, nine, ten, or more immunogenic fragments, wherein each fragment comprises, consists of, or consists essentially of the same amino acid sequence, while also including one, two, three, four, five, six, seven, eight, nine, ten, or more immunogenic fragments, wherein each fragment comprises, consists of, or consists essentially of a different amino acid sequence from each other fragment. In some embodiments, the recombinant polypeptide includes a total of two, three, four or five immunogenic fragments. In yet further embodiments, the recombinant polypeptide includes a total of two or three immunogenic fragments.

[0040] Within the recombinant polypeptide, the at least one immunogenic fragment can be arranged in any suitable serial orientation with respect to the Fc region. In some embodiments, the at least one immunogenic fragment is connected to the N-terminus of the Fc region. This orientation can be depicted as [immunogenic fragment]_{X}—[N-terminus—Fc region—C-terminus], wherein X is an integer 1-10 representing the number of immunogenic fragments within the recombinant polypeptide. In some embodiments, the at least one immunogenic fragment is connected to the C-terminus of the Fc region. This orientation can be depicted as [N-terminus—Fc region—C-terminus]—[immunogenic fragment]_{X}, wherein X is an integer 1-10 representing the number of immunogenic fragments within the recombinant polypeptide. In some embodiments, wherein the recombinant polypeptide includes at least two immunogenic fragments, at least one immunogenic fragment is connected to the N-terminus of the Fc region, and at least one immunogenic fragment is connected to the C-terminus of the Fc region. This orientation can be depicted as [immunogenic fragment]x—[N-terminus—Fc region—C-terminus]—[immunogenic fragment]_{Y}, wherein X and Y are independently an integer 1-10 representing the number of immunogenic fragments connected to each side of the Fc region. In some embodiments, wherein the recombinant polypeptide includes two immunogenic fragments, both immunogenic fragments are connected to the N-terminus of the Fc region. This orientation can be depicted as [immunogenic fragment]—[immunogenic fragment]—[N-terminus-Fc region—C-terminus]. In other embodiments, wherein the recombinant polypeptide includes two immunogenic fragments, both immunogenic fragments are connected to the C-terminus of the Fc region. This orientation can be depicted as [N-terminus—Fc region—C-terminus]—[immunogenic fragment]—[immunogenic fragment]. In some embodiments, wherein the recombinant polypeptide includes three immunogenic fragments, each immunogenic fragment is connected to the N-terminus of the Fc region. This orientation can be depicted as [immunogenic fragment]—[immunogenic fragment]—[immunogenic fragment]—[N-terminus—Fc region—C-terminus]. In other embodiments, wherein the recombinant polypeptide includes three immunogenic fragments, each immunogenic fragment is connected to the C-terminus of the Fc region. This orientation can be depicted as [N-terminus—Fc region—C-terminus]—[immunogenic fragment]—[immunogenic fragment]—[immunogenic fragment].

[0041] Embodiments of the recombinant polypeptide that include a plurality of immunogenic fragments provide for a flexible expression platform with robust expression of full-length protein, modality to modify individual or multiple domains within one or more of the plurality of immunogenic fragments to reflect the most recent virus variant sequence(s), allow for single step affinity purification, and provide high-level, long-term immune response as tested in Rhesus macaques.

[0042] In some embodiments, wherein the recombinant polypeptide includes a plurality of immunogenic fragments, the immunogenic fragments are connected to each other via a linker. The linker can be any suitable linker. Suitable linkers include a polypeptide comprising, consisting of, or consisting essentially of, an amino acid sequence of 1-35 residues, wherein each residue is independently serine, glycine, or aspartic acid, and further wherein the amino acid sequence contains zero or one aspartic acid residues. Other suitable linkers include a polypeptide comprising an amino acid sequence selected from the group consisting of SEQ ID NO: 65 (Fc1), SEQ ID NO: 67 (Fc1-TEV), SEQ ID NO: 69 (Fc1-Rv3C), SEQ ID NO: 193 (Short), SEQ ID NO: 195 (Medium), and SEQ ID NO: 197 (Long). When a recombinant polypeptide includes two or more such linkers, the amino acid sequence of the linkers can be identical or different. In some embodiments, wherein the recombinant polypeptide includes a plurality of immunogenic fragments, the immunogenic fragments are connected directly to each other without an intervening linker.

[0043] In some embodiments, the one or more immunogenic fragments are connected to the antibody Fc region via a linker. The linker can be any suitable linker. Suitable linkers include a polypeptide comprising an amino acid sequence of 1-35 residues, wherein each residue is independently serine, glycine, or aspartic acid, and further wherein the amino acid sequence contains zero or one aspartic acid residues. Other suitable linkers include a polypeptide comprising an amino acid sequence selected from the group consisting of SEQ ID NO: 65 (Fc1), SEQ ID NO: 67 (Fc1-TEV), SEQ ID NO: 69 (Fc1-Rv3C), SEQ ID NO: 193 (Short), SEQ ID NO: 195 (Medium), and SEQ ID NO: 197 (Long). When a recombinant polypeptide includes two or more such linkers, the amino acid sequence of the linkers can be identical or different from each other. In some embodiments, wherein the recombinant polypeptide includes at least one immunogenic fragment connected to the N-terminus of the Fc region, and/or at least one immunogenic fragment is connected to the C-terminus of the Fc region, the immunogenic fragment(s) nearest to the Fc region are connected directly to the Fc region without an intervening linker.

[0044] The antibody Fc region included in the recombinant polypeptide can be any suitable antibody Fc region. Suitable antibody Fc regions include wild-type human or other animal Imunoglobulin Fc regions such as IgG, IgA, IgD, IgE, IgM, and their respective subclases, for example, human IgG1 Fc regions and Fc regions derived therefrom, as well as IgA Fc regions and Fc regions derived therefrom. Other suitable antibody Fc regions include mutant Fc regions that enhance or diminish Fc-receptor binding affinity to speed up or slow down uptake, respectively. In some embodiments, the antibody Fc region comprises the amino acid sequence of SEQ ID NO: 71.

[0045] In some embodiments, the recombinant polypeptide comprises, consists of, or consists essentially of, an amino acid sequence with at least 90%, preferably at least 91%, 92%, 93%, 94%, 95%, 96%, 97%, 98%, or 99%, sequence identity to an amino acid sequence selected from the group consisting of SEQ ID NO: 73 (LS2330 [CTD_short_a-Fc]), SEQ ID NO: 75 (LS3472, LS3473, LS3474 [CTD_long_a-Fc]), SEQ ID NO: 77 (LS3477 [CTD_short_a-TEV-Fc]), SEQ ID NO: 79 (LS3485 [CTD_long_a TEV-Fc]), SEQ ID NO: 81 (LS3489 [CTD_short_a_Rv3c-Fc]), SEQ ID NO: 83 (LS3497 [CTD_long_a-Rv3c-Fc], SEQ ID NO: 85 (LS2316, LS2317, LS2318, LS2319 [CTD_long_a-His8]), SEQ ID NO: 87 (LS3479 [NTD_short_a-TEV-Fc]), SEQ ID NO: 89 (LS3475 [NTD_long_a-TEV-Fc]), SEQ ID NO: 91 (LS3491 [NTD_short_a-Rv3c-Fc]), SEQ ID NO: 93 (LS3487 [NTD_long_a-Rv3C-Fc]), SEQ ID NO: 95 (LS2326 [NTD_long_a-Fc]), SEQ ID NO: 97 (LS2354 [CTD_long_a_D614G-Fc]), SEQ ID NO: 99 (LS2355 [CTD_long_a-Dimer-Fc]), SEQ ID NO:101 (LS2356 [CTD_long_b-Fc]), SEQ ID NO: 103 (LS2357 [CTD_long_c-Fc]), SEQ ID NO: 105 (LS2358 [CTD_long_d-Fc]), SEQ ID NO: 107 (LS2359 [CTD_long_e-Fc]), SEQ ID NO: 109 (LS2360 [CTD_long_f-Fc]), SEQ ID NO: 111 (LS2361 [CTD_long_g-Fc]), SEQ ID NO: 113 (LS2362 [CTD_long_h-Fc]), SEQ ID NO: 115 (LS2363 [CTD_long_i-Fc]), SEQ ID NO: 117 (LS2364 [CTD_short_b-Fc]), SEQ ID NO: 119 (LS2365 [CTD_short_c-Fc]), SEQ ID NO: 121 (LS2366 [CTD_short_d-Fc]), SEQ ID NO: 123 (LS2367 [CTD_short_e-Fc]), SEQ ID NO: 125 (LS2368 [CTD_short_f-Fc]), SEQ ID NO: 127 (LS2369 [CTD_short_g-Fc]), SEQ ID NO: 129 (LS2370 [CTD_short_h-Fc]), SEQ ID NO: 131 (LS2371 [CTD_short_i-Fc]), SEQ ID NO: 133 (LS2372 [CTD_vs_a-Fc]), SEQ ID NO: 135 (LS2373 [CTD_vs_b-Fc]), SEQ ID NO: 137 (LS2374 [CTD_vs_c-Fc]), SEQ ID NO: 139 (LS2375 [CTD_vs_d-Fc]), SEQ ID NO: 141 (LS2376 [CTD_vs_e-Fc]), SEQ ID NO: 143 (LS2377 [RBD_a-Fc]), SEQ ID NO: 145 (LS2378 [RBD_b-Fc]), SEQ ID NO: 147 (LS2379 [RBD_c-Fc]), SEQ ID NO: 149 (LS2380 [RBD_d-Fc]), SEQ ID NO: 151 (LS2381 [RBD_e-Fc]), SEQ ID NO: 153 (LS2382 [NTD_short_a-Fc]), SEQ ID NO: 155 (LS2393 [(RBD-tight)₂-Fc]), SEQ ID NO: 157 (LS2394 [(RBD-extended)₂-Fc]), SEQ ID NO: 159 (LS2395 [(RBD)₂-Fc]), SEQ ID NO: 161 (LS2397-2400 [(CTD_short_d)₂-Fc]), SEQ ID NO: 163 (LS2401-2404 [(CTD_short_i)₂-Fc]), SEQ ID NO: 165 (LS2421 and LS2422 [(CTD_short_i)₂-Fc)-mod. 1], SEQ ID NO: 167 (LS2423 [(CTD_short_i)₂-Fc)-mod. 2], SEQ ID NO: 169 (LS2435 [(CTD_short_i)₂-Fc)-mod. 3], SEQ ID NO: 217, SEQ ID NO: 219, SEQ ID NO: 221 SEQ ID NO: 223, SEQ ID NO: 225, SEQ ID NO: 227, SEQ ID NO: 229, SEQ ID NO: 231, SEQ ID NO: 233, SEQ ID NO: 235, SEQ ID NO: 237, SEQ ID NO: 237, SEQ ID NO: 239, SEQ ID NO: 241, SEQ ID NO: 243, and SEQ ID NOs: 705-716. In some embodiments, the recombinant polypeptide comprises, consists of, or consists essentially of, an amino acid sequence with at least 90%, preferably at least 91%, 92%, 93%, 94%, 95%, 96%, 97%, 98%, or 99%, sequence identity to an amino acid sequence selected from the group consisting of SEQ ID NO: 163 (LS2401-2404 [(CTD_short_i)₂-Fc]), SEQ ID NO: 165 (LS2421 and LS2422 [(CTD_short_i)₂-Fc)-mod. 1], SEQ ID NO: 167 (LS2423 [(CTD_short_i)₂-Fc)-mod. 2], and SEQ ID NO: 169 (LS2435 [(CTD_short_i)₂-Fc)-mod. 3]. In some embodiments, the recombinant polypeptide comprises, consists of, or consists essentially of, an amino acid sequence with at least 90%, preferably at least 91%, 92%, 93%, 94%, 95%, 96%, 97%, 98%, or 99%, sequence identity to the amino acid sequence of SEQ ID NO: 163 (LS2401-2404 [(CTD_short_i)₂-Fc]). In some embodiments, the recombinant polypeptide comprises, consists of, or consists essentially of, an amino acid sequence with at least 90%, preferably at least 91%, 92%, 93%, 94%, 95%, 96%, 97%, 98%, or 99%, sequence identity to an amino acid sequence selected from the group consisting of SEQ ID NO: 161 (LS2397-2400 [(CTD_short_d)₂-Fc]), SEQ ID NO: 121 (LS2366 [CTD_short_d-Fc]), SEQ ID NO: 123 (LS2367 [CTD_short_e-Fc]), SEQ ID NO: 129 (LS2370 [CTD_short_h-Fc]), SEQ ID NO: 131 (LS2371 [CTD_short_i-Fc]), and SEQ ID NO: 73 (LS2330 [CTD_short_a-Fc]). In another embodiment, the recombinant polypeptide comprises, consists of, or consists essentially of, an amino acid sequence with at least 90%, preferably at least 91%, 92%, 93%, 94%, 95%, 96%, 97%, 98%, or 99%, sequence identity to the amino acid sequence represented by SEQ ID NO: 163. In another embodiment, the recombinant polypeptide comprises, consists of, or consists essentially of, an amino acid sequence with at least 90%, preferably at least 91%, 92%, 93%, 94%, 95%, 96%, 97%, 98%, or 99%, sequence identity to the amino acid sequence represented by SEQ ID NO: 169.

[0046] In some embodiments, the recombinant polypeptide comprises, consists of, or consists essentially of, an amino acid sequence with at least 90%, preferably at least 91%, 92%, 93%, 94%, 95%, 96%, 97%, 98%, or 99%, sequence identity to an amino acid sequence selected from the group consisting of SEQ ID NO: 247 (CTD_short_h) 2-Fc), SEQ ID NO: 251 (LS2435 Single domain_(GAMMA-Plus)-Fc), SEQ ID NO: 255 (BETA_CTD_short_i-Fc), SEQ ID NO: 259 (GAMMA_CTD_short_i-Fc), SEQ ID NO: 263 (GAMMA_CTD_short_i-Fc), SEQ ID NO: 267 (DELTA-Plus_CTD_short_i-Fc), SEQ ID NO: 271 (MU_CTD_short_i-Fc), SEQ ID NO: 275 (A.30_CTD_short_i-Fc), SEQ ID NO: 279 (DELTA-Plus+MU_CTD_short_i-Fc), SEQ ID NO: 283 (DELTA-Plus+A.30_CTD_short_i-Fc), SEQ ID NO: 287 (BETA_CTD_short_i)₂-Fc), SEQ ID NO: 291 ((GAMMA_CTD_short_i)₂-Fc), SEQ ID NO: 295 ((DELTA_CTD_short_i)₂-Fc), SEQ ID NO: 299 ((DELTA-Plus_CTD_short_i)₂-Fc), SEQ ID NO: 303 ((MU_CTD_short_i)₂-Fc), SEQ ID NO: 307 ((A.30_CTD_short_i)₂-Fc), SEQ ID NO: 311 ((DELTA-Plus+MU_CTD_short_i)₂-Fc), SEQ ID NO: 315 ((DELTA-Plus+A.30_CTD_short_i)₂-Fc), SEQ ID NO: 319 (Omicron_Boost_CTD_short_i-Fc), SEQ ID NO: 323 ((Omicron_Boost_CTD_short_i)₂-Fc), SEQ ID NO: 327 (Omicron_CTD_short_i-Fc), SEQ ID NO: 331 ((Omicron_CTD_short_i)₂-Fc), SEQ ID NO: 335 (OΔ+μ_1_CTD_short_i-Fc), SEQ ID NO: 339 ((OΔ+μ_1_CTD_short_i)₂-Fc), SEQ ID NO: 343 (OΔ+μ_2_CTD_short_i-Fc), SEQ ID NO: 347 ((OΔ+μ_2_CTD_short_i)₂-Fc), SEQ ID NO: 351 (OΔ+μ_3_CTD_short_i-Fc), SEQ ID NO: 355 ((Δ+μ_3_CTD_short_i)₂-Fc), SEQ ID NO: 359 (OΔ+μ_4_CTD_short_i-Fc), SEQ ID NO: 363 ((OΔ+μ_4_CTD_short_i)₂-Fc), SEQ ID NO: 535 (CTD-gCd01-Fc), SEQ ID NO: 536 (CTD-gCd02-Fc), SEQ ID NO: 537 (CTD-gCd03-Fc), SEQ ID NO: 538 (CTD-gCd04-Fc), SEQ ID NO: 539 (CTD-gCd05-Fc), SEQ ID NO: 540 (CTD-gCd06-Fc), SEQ ID NO: 541 (CTD-gCd07-Fc), SEQ ID NO: 542 (CTD-gCd08-Fc), SEQ ID NO: 543 (CTD-gCd09-Fc), SEQ ID NO: 544 (CTD-gCd10-Fc), SEQ ID NO: 545 (CTD-gCd11-Fc), SEQ ID NO: 546 (CTD-gCd12-Fc), SEQ ID NO: 547 (CTD-gCd13-Fc), SEQ ID NO: 548 (CTD-gCd14-Fc), SEQ ID NO: 549 (CTD-gCd15-Fc), SEQ ID NO: 550 (CTD-gCd16-Fc), SEQ ID NO: 551 (CTD-gCd17-Fc), SEQ ID NO: 552 (CTD-gCd18-Fc), SEQ ID NO: 553 (CTD-gCd19-Fc), SEQ ID NO: 554 (CTD-gCd20-Fc), SEQ ID NO: 555 (CTD-gCd21-Fc), SEQ ID NO: 556 (CTD-gCd22-Fc), SEQ ID NO: 557 (CTD-gCd23-Fc), SEQ ID NO: 558 (CTD-gCd24-Fc), SEQ ID NO: 559 (CTD-gCd25-Fc), SEQ ID NO: 560 (CTD-gCd26-Fc), SEQ ID NO: 561 (CTD-gCd27-Fc), SEQ ID NO: 562 (CTD-gCd28-Fc), SEQ ID NO: 563 (CTD-gCd29-Fc), SEQ ID NO: 564 (CTD-gCd30-Fc), SEQ ID NO: 565 (CTD-gCd31-Fc), SEQ ID NO: 566 (CTD-gCd32-Fc), SEQ ID NO: 567 (CTD-gCd33-Fc), SEQ ID NO: 568 (CTD-gCd34-Fc), SEQ ID NO: 569 (CTD-gCd35-Fc), SEQ ID NO: 570 (CTD-gCd36-Fc), SEQ ID NO: 571 (CTD-gCd37-Fc), SEQ ID NO: 572 (CTD-gCd38-Fc), SEQ ID NO: 573 (CTD-gN01-Fc), SEQ ID NO: 574 (CTD-gN02), SEQ ID NO: 575 (CTD-gN03-Fc), SEQ ID NO: 576 (CTD-gN04-Fc), SEQ ID NO: 577 (CTD-gN05-Fc), SEQ ID NO: 578 (CTD-gN06-Fc), SEQ ID NO: 579 (CTD-gN07-Fc), SEQ ID NO: 580 (CTD-gN08-Fc), SEQ ID NO: 581 (CTD-gN09-Fc), SEQ ID NO: 582 (CTD-gN10-Fc), SEQ ID NO: 583 (CTD-gN11-Fc), SEQ ID NO: 584 (CTD-gN12-Fc), SEQ ID NO: 585 (CTD-gN13-Fc) SEQ ID NO: 586 (CTD-gN14-Fc), SEQ ID NO: 587 (CTD-gN15-Fc), SEQ ID NO: 588 (CTD-gN16-Fc), SEQ ID NO: 589 (CTD-gN17-Fc), SEQ ID NO: 590 (CTD-gN18-Fc), SEQ ID NO: 591 (CTD-gN19-Fc), SEQ ID NO: 592 (CTD-gN20-Fc), SEQ ID NO: 593 (CTD-gN21-Fc), SEQ ID NO: 594 (CTD-gN22-Fc), SEQ ID NO: 595 (CTD-gN23-Fc), SEQ ID NO: 596 (CTD-gN24-Fc), SEQ ID NO: 597 (CTD-gN25-Fc), SEQ ID NO: 598 (CTD-gN26-Fc), SEQ ID NO: 599 (CTD-gN27-Fc), SEQ ID NO: 600 (CTD-gN28-Fc), SEQ ID NO: 601 (CTD-gN29-Fc), SEQ ID NO: 602 (CTD-gN30-Fc), SEQ ID NO: 603 (CTD-gN31-Fc), SEQ ID NO: 604 (CTD-gN32-Fc), SEQ ID NO: 605 (CTD-gN33-Fc), SEQ ID NO: 606 (CTD-gN34-Fc), SEQ ID NO: 607 (CTD-gN35-Fc), SEQ ID NO: 608 (CTD-gN36-Fc), SEQ ID NO: 609 (CTD-gN37-Fc), SEQ ID NO: 610 (CTD-gN38-Fc), SEQ ID NO: 611 (CTD-gN39-Fc), SEQ ID NO: 612 (CTD-gN40-Fc), SEQ ID NO: 613 (CTD-gN41-Fc), SEQ ID NO: 614 (CTD-gN42-Fc), SEQ ID NO: 615 (CTD-gN43-Fc), SEQ ID NO: 616 (CTD-gN44-Fc), SEQ ID NO: 617 (CTD-gN45-Fc), SEQ ID NO: 618 (CTD-gN46-Fc), SEQ ID NO: 619 (CTD-gN47), and SEQ ID NOs: 705-716.

[0047] In some embodiments, the recombinant polypeptide comprises, consists of, or consists essentially of, an amino acid sequence with at least 90%, preferably at least 91%, 92%, 93%, 94%, 95%, 96%, 97%, 98%, or 99%, sequence identity to an amino acid sequence selected from the group consisting of SEQ ID NO: 279 (DELTA-Plus+MU_CTD_short_i-Fc), SEQ ID NO: 283 (DELTA-Plus+A.30_CTD_short_i-Fc), SEQ ID NO: 311 ((DELTA-Plus+MU_CTD_short_i)₂-Fc), SEQ ID NO: 315 ((DELTA-Plus+A.30_CTD_short_i)₂-Fc), SEQ ID NO: 335 (OΔ+μ_1_CTD_short_i-Fc), and SEQ ID NO: 339 ((OΔ+μ_1_CTD_short_i)₂-Fc).

[0048] In some embodiments, the recombinant polypeptide comprises, consists of, or consists essentially of, an amino acid sequence selected from the group consisting of SEQ ID NOS: 73, 75, 77, 79, 81, 83, 85, 87, 89, 91, 91, 93, 95, 97, 99, 101, 103, 105, 107, 109, 111, 113, 115, 117, 119, 121, 123, 125, 127, 129, 131, 133, 135, 137, 139, 141, 143, 145, 147, 149, 151, 153, 155, 157, 159, 161, 163, 165, 167, 169, 217, 219, 221, 223, 225, 227, 229, 231, 233, 235, 237, 239, 241, 243, and 705-716. In some embodiments, the recombinant polypeptide comprises, consists of, or consists essentially of, an amino acid sequence selected from the group consisting of SEQ ID NO: 163 (LS2401-2404 [(CTD_short_i)₂-Fc]), SEQ ID NO: 165 (LS2421 and LS2422 [(CTD_short_i)₂-Fc), SEQ ID NO: 167 (LS2423 [(CTD_short_i)₂-Fc), and SEQ ID NO: 169 (LS2435 [(CTD_short_i)₂-Fc). In some embodiments, the recombinant polypeptide comprises, consists of, or consists essentially of, the amino acid sequence of SEQ ID NO: 163 (LS2401-2404 [(CTD_short_i)₂-Fc]). In some embodiments, the recombinant polypeptide comprises, consists of, or consists essentially of, an amino acid sequence selected from the group consisting of SEQ ID NO: 161 (LS2397-2400 [(CTD_short_d)₂-Fc]), SEQ ID NO: 121 (LS2366 [CTD_short_d-Fc]), SEQ ID NO: 123 (LS2367 [CTD_short_e-Fc]), SEQ ID NO: 129 (LS2370 [CTD_short_h-Fc]), SEQ ID NO: 131 (LS2371 [CTD_short_i-Fc]), and SEQ ID NO: 73 (LS2330 [CTD_short_a-Fc]). In another embodiment, the recombinant polypeptide comprises, consists of, or consists essentially of, the amino acid sequence represented by SEQ ID NO: 163. In another embodiment, the recombinant polypeptide comprises, consists of, or consists essentially of, the amino acid sequence represented by SEQ ID NO: 169. In some embodiments, the recombinant polypeptide comprises, consists of, or consists essentially of, an amino acid sequence selected from the group consisting of SEQ ID NOs: 705-716.

[0049] In some embodiments, the recombinant polypeptide comprises, consists of, or consists essentially of, an amino acid sequence selected from the group consisting of SEQ ID NOS: 247, 251, 255, 259, 263, 267, 271, 275, 279, 283, 287, 291, 295, 299, 303, 307, 311, 315, 319, 323, 327, 331, 335, 339, 343, 347, 351, 355, 359, 363, 535-619, and 705-716. In some embodiments, the recombinant polypeptide comprises, consists of, or consists essentially of, an amino acid sequence selected from the group consisting of SEQ ID NOs: 279, 283, 311, 315, 335, and 339.

[0050] In some embodiments, the recombinant polypeptide is encoded by a recombinant polynucleotide. In certain embodiments, the polynucleotide comprises, consists of, or consists essentially of a nucleic acid sequence with at least 90%, preferably at least 91%, 92%, 93%, 94%, 95%, 96%, 97%, 98%, or 99%, sequence identity to a nucleic acid sequence selected from the group consisting of SEQ ID NO: 74 (LS2330 [CTD_short_a-Fc]), SEQ ID NO: 76 (LS3472, LS3473, LS3474 [CTD_long_a-Fc]), SEQ ID NO: 78 (LS3477 [CTD_short_a-TEV-Fc]), SEQ ID NO: 80 (LS3485 [CTD_long_a TEV-Fc]), SEQ ID NO: 82 (LS3489 [CTD_short_a_Rv3c-Fc]), SEQ ID NO: 84 (LS3497 [CTD_long_a-Rv3c-Fc], SEQ ID NO: 86 (LS2316, LS2317, LS2318, LS2319 [CTD_long_a-His8]), SEQ ID NO: 88 (LS3479 [NTD_short_a-TEV-Fc]), SEQ ID NO: 90 (LS3475 [NTD_long_a-TEV-Fc]), SEQ ID NO: 92 (LS3491 [NTD_short_a-Rv3c-Fc]), SEQ ID NO: 94 (LS3487 [NTD_long_a-Rv3C-Fc]), SEQ ID NO: 96 (LS2326 [NTD_long_a-Fc]), SEQ ID NO: 98 (LS2354 [CTD_long_a_D614G-Fc]), SEQ ID NO: 100 (LS2355 [CTD_long_a-Dimer-Fc]), SEQ ID NO: 102 (LS2356 [CTD_long_b-Fc]), SEQ ID NO: 104 (LS2357 [CTD_long_c-Fc]), SEQ ID NO: 106 (LS2358 [CTD_long_d-Fc]), SEQ ID NO: 108 (LS2359 [CTD_long_e-Fc]), SEQ ID NO: 110 (LS2360 [CTD_long_f-Fc]), SEQ ID NO: 112 (LS2361 [CTD_long_g-Fc]), SEQ ID NO: 114 (LS2362 [CTD_long_h-Fc]), SEQ ID NO: 116 (LS2363 [CTD_long_i-Fc]), SEQ ID NO: 118 (LS2364 [CTD_short_b-Fc]), SEQ ID NO: 120 (LS2365 [CTD_short_c-Fc]), SEQ ID NO: 122 (LS2366 [CTD_short_d-Fc]), SEQ ID NO: 124 (LS2367 [CTD_short_e-Fc]), SEQ ID NO: 126 (LS2368 [CTD_short_f-Fc]), SEQ ID NO: 128 (LS2369 [CTD_short_g-Fc]), SEQ ID NO: 130 (LS2370 [CTD_short_h-Fc]), SEQ ID NO: 132 (LS2371 [CTD_short_i-Fc]), SEQ ID NO: 134 (LS2372 [CTD_vs_a-Fc]), SEQ ID NO: 136 (LS2373 [CTD_vs_b-Fc]), SEQ ID NO: 138 (LS2374 [CTD_vs_c-Fc]), SEQ ID NO: 140 (LS2375 [CTD_vs_d-Fc]), SEQ ID NO: 142 (LS2376 [CTD_vs_e-Fc]), SEQ ID NO: 144 (LS2377 [RBD_a-Fc]), SEQ ID NO: 146 (LS2378 [RBD_b-Fc]), SEQ ID NO: 148 (LS2379 [RBD_c-Fc]), SEQ ID NO: 150 (LS2380 [RBD_d-Fc]), SEQ ID NO: 152 (LS2381 [RBD_e-Fc]), SEQ ID NO: 154 (LS2382 [NTD_short_a-Fc]), SEQ ID NO: 156 (LS2393 [(RBD-tight)₂-Fc]), SEQ ID NO: 158 (LS2394 [(RBD-extended)₂-Fc]), SEQ ID NO: 160 (LS2395 [(RBD)₂-Fc]), SEQ ID NO: 162 (LS2397-2400 [(CTD_short_d)₂-Fc]), SEQ ID NO: 164 (LS2401-2404 [(CTD_short_i)₂-Fc]), SEQ ID NO: 166 (LS2421 and LS2422 [(CTD_short_i)₂-Fc), SEQ ID NO: 168 (LS2423 [(CTD_short_i)₂-Fc), SEQ ID NO: 170 (LS2435 [(CTD_short_i)₂-Fc), SEQ ID NO: 218, SEQ ID NO: 220, SEQ ID NO: 222, SEQ ID NO: 224, SEQ ID NO: 226, SEQ ID NO: 228, SEQ ID NO: 230, SEQ ID NO: 232, SEQ ID NO: 234, SEQ ID NO: 236, SEQ ID NO: 238, SEQ ID NO: 240, SEQ ID NO: 242, SEQ ID NO: 244, and SEQ ID NOs: 717-728.

[0051] In some embodiments, the polynucleotide comprises, consists of, or consists essentially of a nucleic acid sequence with at least 90%, preferably at least 91%, 92%, 93%, 94%, 95%, 96%, 97%, 98%, or 99%, sequence identity to a nucleic acid sequence selected from the group consisting of SEQ ID NO: 164 (LS2401-2404 [(CTD_short_i)₂-Fc]), SEQ ID NO: 166 (LS2421 and LS2422 [(CTD_short_i)₂-Fc)-mod.1], SEQ ID NO: 168 (LS2423 [(CTD_short_i)₂-Fc)-mod. 2]), and SEQ ID NO: 170 (LS2435 [(CTD_short_i)₂-Fc-mod. 3). In some embodiments, the polynucleotide comprises, consists of, or consists essentially of, an nucleic acid sequence with at least 90%, preferably at least 91%, 92%, 93%, 94%, 95%, 96%, 97%, 98%, or 99%, sequence identity to the nucleic acid sequence of SEQ ID NO: 164 (LS2401-2404 [(CTD_short_i)₂-Fc]). In some embodiments, the polynucleotide comprises, consists of, or consists essentially of, an nucleic acid sequence with at least 90%, preferably at least 91%, 92%, 93%, 94%, 95%, 96%, 97%, 98%, or 99%, sequence identity to an nucleic acid sequence selected from the group consisting of SEQ ID NO: 162 (LS2397-2400 [(CTD_short_d)₂-Fc]), SEQ ID NO: 122 (LS2366 [CTD_short_d-Fc]), SEQ ID NO: 124 (LS2367 [CTD_short_e-Fc]), SEQ ID NO: 130 (LS2370 [CTD_short_h-Fc]), SEQ ID NO: 132 (LS2371 [CTD_short_i-Fc]), and SEQ ID NO: 74 (LS2330 [CTD_short_a-Fc]). In an embodiment, the polynucleotide comprises, consists of, or consists essentially of a nucleic acid sequence with at least 90%, preferably at least 91%, 92%, 93%, 94%, 95%, 96%, 97%, 98%, or 99%, sequence identity to the nucleic acid sequence represented by SEQ ID NO: 164. In an embodiment, the polynucleotide comprises, consists of, or consists essentially of a nucleic acid sequence with at least 90%, preferably at least 91%, 92%, 93%, 94%, 95%, 96%, 97%, 98%, or 99%, sequence identity to the nucleic acid sequence represented by SEQ ID NO: 170. In some embodiments, the polynucleotide comprises, consists of, or consists essentially of, an nucleic acid sequence with at least 90%, preferably at least 91%, 92%, 93%, 94%, 95%, 96%, 97%, 98%, or 99%, sequence identity to an nucleic acid sequence selected from the group consisting of SEQ ID NOs: 717-728.

[0052] In some embodiments, the recombinant polypeptide is encoded by a recombinant polynucleotide. In certain embodiments, the polynucleotide comprises, consists of, or consists essentially of a nucleic acid sequence with at least 90%, preferably at least 91%, 92%, 93%, 94%, 95%, 96%, 97%, 98%, or 99%, sequence identity to a nucleic acid sequence selected from the group consisting of SEQ ID NO: 248 (CTD_short_h) 2-Fc), SEQ ID NO: 252 (LS2435 Single domain_(GAMMA-Plus)-Fc), SEQ ID NO: 256 (BETA_CTD_short_i-Fc), SEQ ID NO: 260 (GAMMA_CTD_short_i-Fc), SEQ ID NO: 264 (GAMMA_CTD_short_i-Fc), SEQ ID NO: 268 (DELTA-Plus_CTD_short_i-Fc), SEQ ID NO: 272 (MU_CTD_short_i-Fc), SEQ ID NO: 276 (A.30_CTD_short_i-Fc), SEQ ID NO: 280 (DELTA-Plus+MU_CTD_short_i-Fc), SEQ ID NO: 284 (DELTA-Plus+A.30_CTD_short_i-Fc), SEQ ID NO: 288 (BETA_CTD_short_i)₂-Fc), SEQ ID NO: 292 ((GAMMA_CTD_short_i)₂-Fc), SEQ ID NO: 296 ((DELTA_CTD_short_i)₂-Fc), SEQ ID NO: 300 ((DELTA-Plus_CTD_short_i)₂-Fc), SEQ ID NO: 304 ((MU_CTD_short_i)₂-Fc), SEQ ID NO: 308 ((A.30_CTD_short_i)₂-Fc), SEQ ID NO: 312 ((DELTA-Plus+MU_CTD_short_i)₂-Fc), SEQ ID NO: 316 ((DELTA-Plus+A.30_CTD_short_i)₂-Fc), SEQ ID NO: 320 (Omicron_Boost_CTD_short_i-Fc), SEQ ID NO: 324 ((Omicron_Boost_CTD short_i)₂-Fc), SEQ ID NO: 328 (Omicron_CTD_short_i-Fc), SEQ ID NO: 332 ((Omicron_CTD short_i)₂-Fc), SEQ ID NO: 336 (OΔ+μ_1_CTD_short_i-Fc), SEQ ID NO: 340 ((Δ+μ_1_CTD_short_i)₂-Fc), SEQ ID NO: 344 (Δ+μ_2_CTD_short_i-Fc), SEQ ID NO: 348 ((OΔ+μ_2_CTD_short_i)₂-Fc), SEQ ID NO: 352 (OΔ+μ_3_CTD_short_i-Fc), SEQ ID NO: 356 ((Δ+μ_3_CTD_short_i)₂-Fc), SEQ ID NO: 360 (Δ+μ_4_CTD_short_i-Fc), SEQ ID NO: 364 ((OΔ+μ_4_CTD_short_i)₂-Fc), SEQ ID NO: 620 (CTD-gCd01-Fc), SEQ ID NO: 621 (CTD-gCd02-Fc), SEQ ID NO: 622 (CTD-gCd03-Fc), SEQ ID NO: 623 (CTD-gCd04-Fc), SEQ ID NO: 624 (CTD-gCd05-Fc), SEQ ID NO: 625 (CTD-gCd06-Fc), SEQ ID NO: 626 (CTD-gCd07-Fc), SEQ ID NO: 627 (CTD-gCd08-Fc), SEQ ID NO: 628 (CTD-gCd09-Fc), SEQ ID NO: 629 (CTD-gCd10-Fc), SEQ ID NO: 630 (CTD-gCd11-Fc), SEQ ID NO: 631 (CTD-gCd12-Fc), SEQ ID NO: 632 (CTD-gCd13-Fc), SEQ ID NO: 633 (CTD-gCd14-Fc), SEQ ID NO: 634 (CTD-gCd15-Fc), SEQ ID NO: 635 (CTD-gCd16-Fc), SEQ ID NO: 636 (CTD-gCd17-Fc), SEQ ID NO: 637 (CTD-gCd18-Fc), SEQ ID NO: 638 (CTD-gCd19-Fc), SEQ ID NO: 639 (CTD-gCd20-Fc), SEQ ID NO: 640 (CTD-gCd21-Fc), SEQ ID NO: 641 (CTD-gCd22-Fc), SEQ ID NO: 642 (CTD-gCd23-Fc), SEQ ID NO: 643 (CTD-gCd24-Fc), SEQ ID NO: 644 (CTD-gCd25-Fc), SEQ ID NO: 645 (CTD-gCd26-Fc), SEQ ID NO: 646 (CTD-gCd27-Fc), SEQ ID NO: 647 (CTD-gCd28-Fc), SEQ ID NO: 648 (CTD-gCd29-Fc), SEQ ID NO: 649 (CTD-gCd30-Fc), SEQ ID NO: 650 (CTD-gCd31-Fc), SEQ ID NO: 651 (CTD-gCd32-Fc), SEQ ID NO: 652 (CTD-gCd33-Fc), SEQ ID NO: 653 (CTD-gCd34-Fc), SEQ ID NO: 654 (CTD-gCd35-Fc), SEQ ID NO: 655 (CTD-gCd36-Fc), SEQ ID NO: 656 (CTD-gCd37-Fc), SEQ ID NO: 657 (CTD-gCd38-Fc), SEQ ID NO: 658 (CTD-gN01-Fc), SEQ ID NO: 659 (CTD-gN02), SEQ ID NO: 660 (CTD-gN03-Fc), SEQ ID NO: 661 (CTD-gN04-Fc), SEQ ID NO: 662 (CTD-gN05-Fc), SEQ ID NO: 663 (CTD-gN06-Fc), SEQ ID NO: 664 (CTD-gN07-Fc), SEQ ID NO: 665 (CTD-gN08-Fc), SEQ ID NO: 666 (CTD-gN09-Fc), SEQ ID NO: 667 (CTD-gN10-Fc), SEQ ID NO: 668 (CTD-gN11-Fc), SEQ ID NO: 669 (CTD-gN12-Fc), SEQ ID NO: 670 (CTD-gN13-Fc) SEQ ID NO: 671 (CTD-gN14-Fc), SEQ ID NO: 672 (CTD-gN15-Fc), SEQ ID NO: 673 (CTD-gN16-Fc), SEQ ID NO: 674 (CTD-gN17-Fc), SEQ ID NO: 675 (CTD-gN18-Fc), SEQ ID NO: 676 (CTD-gN19-Fc), SEQ ID NO: 677 (CTD-gN20-Fc), SEQ ID NO: 678 (CTD-gN21-Fc), SEQ ID NO: 679 (CTD-gN22-Fc), SEQ ID NO: 680 (CTD-gN23-Fc), SEQ ID NO: 681 (CTD-gN24-Fc), SEQ ID NO: 682 (CTD-gN25-Fc), SEQ ID NO: 683 (CTD-gN26-Fc), SEQ ID NO: 684 (CTD-gN27-Fc), SEQ ID NO: 685 (CTD-gN28-Fc), SEQ ID NO: 686 (CTD-gN29-Fc), SEQ ID NO: 687 (CTD-gN30-Fc), SEQ ID NO: 688 (CTD-gN31-Fc), SEQ ID NO: 689 (CTD-gN32-Fc), SEQ ID NO: 690 (CTD-gN33-Fc), SEQ ID NO: 691 (CTD-gN34-Fc), SEQ ID NO: 692 (CTD-gN35-Fc), SEQ ID NO: 693 (CTD-gN36-Fc), SEQ ID NO: 694 (CTD-gN37-Fc), SEQ ID NO: 695 (CTD-gN38-Fc), SEQ ID NO: 696 (CTD-gN39-Fc), SEQ ID NO: 697 (CTD-gN40-Fc), SEQ ID NO: 698 (CTD-gN41-Fc), SEQ ID NO: 699 (CTD-gN42-Fc), SEQ ID NO: 700 (CTD-gN43-Fc), SEQ ID NO: 701 (CTD-gN44-Fc), SEQ ID NO: 702 (CTD-gN45-Fc), SEQ ID NO: 703 (CTD-gN46-Fc), and SEQ ID NO: 704 (CTD-gN47).

[0053] In certain embodiments, the polynucleotide comprises, consists of, or consists essentially of a nucleic acid sequence with at least 90%, preferably at least 91%, 92%, 93%, 94%, 95%, 96%, 97%, 98%, or 99%, sequence identity to a nucleic acid sequence selected from the group consisting of SEQ ID NO: 280, 284, 312, 316, 336, and 340.

[0054] In some embodiments, the polynucleotide comprises, consists of, or consists essentially of a nucleic acid sequence selected from the group consisting of SEQ ID NO: 74, 76, 78, 80, 82, 84, 86, 88, 90, 92, 94, 96, 98, 100, 102, 104, 106, 108, 110, 112, 114, 116, 118, 120, 122, 124, 126, 128, 130, 132, 134, 136, 138, 140, 142, 144, 146, 148, 150, 152, 154, 156, 158, 160, 162, 164, 166, 168, 170, 218, 220, 222, 224, 226, 228, 230, 232, 234, 236, 238, 240, 242, 244, and 717-728. In some embodiments, the polynucleotide comprises, consists of, or consists essentially of a nucleic acid sequence selected from the group consisting of SEQ ID NO: 164 (LS2401-2404 [(CTD_short_i)₂-Fc]), SEQ ID NO: 166 (LS2421 and LS2422 [(CTD_short_i)₂-Fc)-mod. 1], SEQ ID NO: 168 (LS2423 [(CTD_short_i)₂-Fc)-mod.2], and SEQ ID NO: 170 (LS2435 [(CTD_short_i)₂-Fc)-mod. 3]. In some embodiments, the polynucleotide comprises, consists of, or consists essentially of, the nucleic acid sequence of SEQ ID NO: 164 (LS2401-2404 [(CTD_short_i)₂-Fc]). In some embodiments, the polynucleotide comprises, consists of, or consists essentially of, an nucleic acid sequence selected from the group consisting of SEQ ID NO: 162 (LS2397-2400 [(CTD_short_d)₂-Fc]), SEQ ID NO: 122 (LS2366 [CTD_short_d-Fc]), SEQ ID NO: 124 (LS2367 [CTD_short_e-Fc]), SEQ ID NO: 130 (LS2370 [CTD_short_h-Fc]), SEQ ID NO: 132 (LS2371 [CTD_short_i-Fc]), and SEQ ID NO: 74 (LS2330 [CTD_short_a-Fc]). In an embodiment, the polynucleotide comprises, consists of, or consists essentially of a nucleic acid sequence represented by SEQ ID NO: 164. In an embodiment, the polynucleotide comprises, consists of, or consists essentially of a nucleic acid sequence represented by SEQ ID NO: 170. In some embodiments, the polynucleotide comprises, consists of, or consists essentially of, a nucleic acid sequence selected from the group consisting of SEQ ID NOs: 717-728.

[0055] In some embodiments, the polynucleotide comprises, consists of, or consists essentially of a nucleic acid sequence selected from the group consisting of SEQ ID NOs: 248, 252, 256, 260, 264, 268, 272, 276, 280, 284, 288, 292, 296, 300, 304, 308, 312, 316, 320, 324, 328, 332, 336, 340, 344, 348, 352, 356, 360, 364 620-704, and 717-728. In some embodiments, the polynucleotide comprises, consists of, or consists essentially of a nucleic acid sequence selected from the group consisting of SEQ ID NOs: 280, 284, 312, 316, 336, and 340.

[0056] In some embodiments, the nucleotide sequence of the polynucleotide is codon optimized and/or codon pair optimized.

[0057] Another embodiment is a recombinant vector that comprises, consists of, or consists essentially of, a polynucleotide that encodes the recombinant polypeptide described herein. The recombinant vector can be any suitable vector. Examples of suitable recombinant vectors include but are not limited to a pcDNA3.1, a pSV, a pCMV, a pBApo-CMV, or a pBApo-EF1alpha expression vector.

[0058] Yet another embodiment is an isolated cell that includes the recombinant polypeptide described herein or a recombinant polynucleotide that contains a nucleic acid sequence that encodes the recombinant polypeptide.

[0059] Another embodiment is a pharmaceutical composition that contains the recombinant polypeptide described herein and at least one pharmaceutically acceptable carrier. The at least one pharmaceutically acceptable carrier can be any suitable carrier. Examples of suitable carriers include water and any suitable buffer. Suitable buffers include HEPES-buffered saline and phosphate-buffered saline. In certain embodiments, the pharmaceutical composition further contains at least one adjuvant. The at least one adjuvant can be any suitable adjuvant. Examples of suitable adjuvants include alum adjuvants, emulsion adjuvants, and pattern recognition receptor agonist adjuvants. Further examples include AS03, MF59, Squalene Emulsion, Alum, aluminum hydroxide gels, calcium phosphate hydroxide, paraffin oil, cytokines (IL-1, IL-2, IL-12), killed bacterial products such as Bordetella and Mycobacterium bacteria, bacterial toxoids, squalene and DL-α-tocopherol emulsions, squalene-oil-in-water emulsion, aluminum phosphate gels, saponins, cyclic dinucleotides, and TLR agonists, preferably TLR1, TLR2, TLR4, TLR5, TLR7, TLR8, TLR9 etc., and combinations thereof. In certain embodiments, the adjuvant is AS03. In certain other embodiments, the adjuvant is Alum. In yet further embodiments, the pharmaceutical composition does not contain an adjuvant.

[0060] The pharmaceutical composition can contain any therapeutically effective amount of the recombinant polypeptide described herein. A therapeutically effective amount is an amount sufficient to induce an immune response against the target virus or viruses, for instance, SARS-CoV-2, SARS-COV, and/or MERS-COV, preferably SARS-COV-2. Typically, a dosage is therapeutically effective if it prevents, inhibits, reduces, eliminates, protects against, and/or delays the onset of an infection or an infectious clinical condition caused by a beta coronavirus in a subject. Infectious clinical conditions include, for example, fever or chills, cough, shortness of breath or difficult breathing, fatigue, muscle or body aches, headache, loss of taste or smell, sore throat, congestion, runny nose, nausea, vomiting, and diarrhea. In some embodiments, a single dose of the pharmaceutical composition contains 10 nanograms to 1 milligram, 0.1-250 micrograms, 10-100 micrograms, or 12.5-50 micrograms of the recombinant polypeptide. In some embodiments, a single dose of the pharmaceutical composition contains 0.01-1, 0.1-1, 0.5-5, 1-20, or 5-15, 1-50, or 10-50 micrograms of the recombinant polypeptide. In some embodiments, wherein the pharmaceutical composition does not contain an adjuvant, a single dose of the pharmaceutical composition could contain. 01-1, 0.1-1, 0.5-5, 1-20, or 5-15, 1-50, or 10-50 micrograms of the recombinant polypeptide. However, a single dose of the pharmaceutical composition could also contain increased amounts of the recombinant polypeptide, such as 100-1000, 100-250, or 250-500 micrograms of recombinant polypeptide.

[0061] A further embodiment is a method for preventing, inhibiting, reducing, eliminating, protecting against, or delaying the onset of an infection or an infectious clinical condition caused by a beta coronavirus in a subject comprising administering to the subject the recombinant polypeptide described herein, the polypeptide encoded by the recombinant polynucleotide described herein, or a dose of the pharmaceutical composition described herein. Examples of beta coronaviruses include SARS-COV, MERS-COV, and SARS-COV-2.

[0062] Another embodiment is a method for inducing an immune response against a beta coronavirus in a subject comprising administering to the subject the recombinant polypeptide described herein, the polypeptide encoded by the recombinant polynucleotide described herein, or a dose of the pharmaceutical composition described herein. Examples of beta coronaviruses include SARS-COV, MERS-COV, and SARS-COV-2.

[0063] In the methods described herein, administration can be achieved by any suitable administration method. Suitable administration methods include oral, parenteral, subcutaneous, intravenous, intramuscular, intrapulmonary, intranasal, intraarterial, intrathecal, and intraperitoneal administration.

[0064] In the methods described herein, the subject can be any suitable animal that is capable of being infected by a beta coronavirus, such as SARS-COV, MERS-COV, and SARS-COV-2. The subject can be a human, non-human primate, horse, pig, cattle, cat, dog, sheep, mink, rodent, hamster, or bat, preferably human.

### Examples of Non-Limiting Aspects of the Disclosure

[0065] Aspects, including embodiments, of the invention described herein may be beneficial alone or in combination, with one or more other aspects or embodiments. Without limiting the foregoing description, certain non-limiting aspects of the disclosure numbered (1)-(36) are provided below. As will be apparent to those of skill in the art upon reading this disclosure, each of the individually numbered aspects may be used or combined with any of the preceding or following individually numbered aspects. This is intended to provide support for all such combinations of aspects and is not limited to combinations of aspects explicitly provided below:

[0066] (1) A recombinant polypeptide comprising at least one immunogenic fragment of Severe Acute Respiratory Syndrome Coronavirus 2 (SARS-COV-2) spike glycoprotein and an antibody Fc region.

[0067] (2) The recombinant polypeptide of aspect 1, wherein the at least one fragment of the SARS-COV-2 spike glycoprotein comprises the N-terminal domain of the S1 subunit, the C-terminal domain of the S1 subunit, or both.

[0068] (3) The recombinant polypeptide of aspect 1 or 2, wherein the at least one fragment of the SARS-COV-2 spike glycoprotein comprises an amino acid sequence with at least 90%, preferably at least 91%, 92%, 93%, 94%, 95%, 96%, 97%, 98%, or 99%, sequence identity to an amino acid sequence selected from the group consisting of SEQ ID NO: 245 (CTD_short_h) 2), SEQ ID NO: 249 (LS2435 Single domain_(GAMMA-Plus)), SEQ ID NO: 253 (BETA_CTD_short_i), SEQ ID NO: 257 (GAMMA_CTD_short_i), SEQ ID NO: 261 (GAMMA_CTD_short_i), SEQ ID NO: 265 (DELTA-Plus_CTD_short_i), SEQ ID NO: 269 (MU_CTD_short_i), SEQ ID NO: 273 (A.30_CTD_short_i), SEQ ID NO: 277 (DELTA-Plus+MU_CTD_short_i), SEQ ID NO: 281 (DELTA-Plus+A.30_CTD_short_i), SEQ ID NO: 285 (BETA_CTD_short_i)₂), SEQ ID NO: 289 ((GAMMA_CTD_short_i)₂), SEQ ID NO: 293 ((DELTA_CTD_short_i)₂), SEQ ID NO: 297 ((DELTA-Plus_CTD_short_i)₂), SEQ ID NO: 301 ((MU_CTD_short_i)₂), SEQ ID NO: 305 ((A.30_CTD_short_i)₂), SEQ ID NO: 309 ((DELTA-Plus+MU_CTD_short_i)₂), SEQ ID NO: 313 ((DELTA-Plus+A.30_CTD_short_i)₂), SEQ ID NO: 317 (Omicron_Boost_CTD_short_i), SEQ ID NO: 321 ((Omicron_Boost_CTD_short_i)₂), SEQ ID NO: 325 (Omicron_CTD_short_i), SEQ ID NO: 329 ((Omicron_CTD_short_i)₂), SEQ ID NO: 333 (Δ+μ_1_CTD_short_i), SEQ ID NO: 337 ((Δ+μ_2_CTD_short_i)₂), SEQ ID NO: 341 (OΔ+μ_2_CTD_short_i), SEQ ID NO: 345 ((OΔ+μ_2_CTD_short_i)₂), SEQ ID NO: 349 (OΔ+μ_3_CTD_short_i), SEQ ID NO: 353 ((OΔ+μ_3_CTD_short_i)₂), SEQ ID NO: 357 (OΔ+μ_4_CTD_short_i), SEQ ID NO: 361 ((OΔ+μ_4_CTD_short_i)₂), SEQ ID NO: 365 (CTD-gCd01), SEQ ID NO: 366 (CTD-gCd02), SEQ ID NO: 367 (CTD-gCd03), SEQ ID NO: 368 (CTD-gCd04), SEQ ID NO: 369 (CTD-gCd05), SEQ ID NO: 370 (CTD-gCd06), SEQ ID NO: 371 (CTD-gCd07), SEQ ID NO: 372 (CTD-gCd08), SEQ ID NO: 373 (CTD-gCd09), SEQ ID NO: 374 (CTD-gCd10), SEQ ID NO: 375 (CTD-gCd11), SEQ ID NO: 376 (CTD-gCd12), SEQ ID NO: 377 (CTD-gCd13), SEQ ID NO: 378 (CTD-gCd14), SEQ ID NO: 379 (CTD-gCd15), SEQ ID NO: 380 (CTD-gCd16), SEQ ID NO: 381 (CTD-gCd17), SEQ ID NO: 382 (CTD-gCd18), SEQ ID NO: 383 (CTD-gCd19), SEQ ID NO: 384 (CTD-gCd20), SEQ ID NO: 385 (CTD-gCd21), SEQ ID NO: 386 (CTD-gCd22), SEQ ID NO: 387 (CTD-gCd23), SEQ ID NO: 388 (CTD-gCd24), SEQ ID NO: 389 (CTD-gCd25), SEQ ID NO: 390 (CTD-gCd26), SEQ ID NO: 391 (CTD-gCd27), SEQ ID NO: 392 (CTD-gCd28), SEQ ID NO: 393 (CTD-gCd29), SEQ ID NO: 394 (CTD-gCd30), SEQ ID NO: 395 (CTD-gCd31), SEQ ID NO: 396 (CTD-gCd32), SEQ ID NO: 397 (CTD-gCd33), SEQ ID NO: 398 (CTD-gCd34), SEQ ID NO: 399 (CTD-gCd35), SEQ ID NO: 400 (CTD-gCd36), SEQ ID NO: 401 (CTD-gCd37), SEQ ID NO: 402 (CTD-gCd38), SEQ ID NO: 403 (CTD-gN01), SEQ ID NO: 404 (CTD-gN02), SEQ ID NO: 405 (CTD-gN03), SEQ ID NO: 406 (CTD-gN04), SEQ ID NO: 407 (CTD-gN05), SEQ ID NO: 408 (CTD-gN06), SEQ ID NO: 409 (CTD-gN07), SEQ ID NO: 410 (CTD-gN08), SEQ ID NO: 411 (CTD-gN09), SEQ ID NO: 412 (CTD-gN10), SEQ ID NO: 413 (CTD-gN11), SEQ ID NO: 414 (CTD-gN12), SEQ ID NO: 415 (CTD-gN13) SEQ ID NO: 416 (CTD-gN14), SEQ ID NO: 417 (CTD-gN15), SEQ ID NO: 418 (CTD-gN16), SEQ ID NO: 419 (CTD-gN17), SEQ ID NO: 420 (CTD-gN18), SEQ ID NO: 421 (CTD-gN19), SEQ ID NO: 422 (CTD-gN20), SEQ ID NO: 423 (CTD-gN21), SEQ ID NO: 424 (CTD-gN22), SEQ ID NO: 425 (CTD-gN23), SEQ ID NO: 426 (CTD-gN24), SEQ ID NO: 427 (CTD-gN25), SEQ ID NO: 428 (CTD-gN26), SEQ ID NO: 429 (CTD-gN27), SEQ ID NO: 430 (CTD-gN28), SEQ ID NO: 431 (CTD-gN29), SEQ ID NO: 432 (CTD-gN30), SEQ ID NO: 433 (CTD-gN31), SEQ ID NO: 434 (CTD-gN32), SEQ ID NO: 435 (CTD-gN33), SEQ ID NO: 436 (CTD-gN34), SEQ ID NO: 437 (CTD-gN35), SEQ ID NO: 438 (CTD-gN36), SEQ ID NO: 439 (CTD-gN37), SEQ ID NO: 440 (CTD-gN38), SEQ ID NO: 441 (CTD-gN39), SEQ ID NO: 442 (CTD-gN40), SEQ ID NO: 443 (CTD-gN41), SEQ ID NO: 444 (CTD-gN42), SEQ ID NO: 445 (CTD-gN43), SEQ ID NO: 446 (CTD-gN44), SEQ ID NO: 447 (CTD-gN45), SEQ ID NO: 448 (CTD-gN46), SEQ ID NO: 449 (CTD-gN47), and SEQ ID NOs: 705-716.

[0069] (4) The recombinant polypeptide of any one of aspects 1-3, wherein the polypeptide comprises an amino acid sequence selected from the group consisting of SEQ ID NOS: 245, 249, 253, 257, 261, 265, 269, 273, 277, 281, 285, 289, 293, 297, 301, 305, 309, 313, 317, 321, 325, 329, 333, 337, 341, 345, 349, 353, 357, 361, 365-449, and 705-716.

[0070] (5) The recombinant polypeptide of any of one aspects 1-4, wherein the polypeptide comprises at least two immunogenic fragments.

[0071] (6) The recombinant polypeptide of aspect 5, wherein each of the at least two immunogenic fragments comprises an amino acid sequence with at least 90%, preferably at least 91%, 92%, 93%, 94%, 95%, 96%, 97%, 98%, or 99%, sequence identity to an amino acid sequence selected from the group consisting of SEQ ID NO: 245 (CTD_short_h) 2), SEQ ID NO: 249 (LS2435 Single domain_(GAMMA-Plus)), SEQ ID NO: 253 (BETA_CTD_short_i), SEQ ID NO: 257 (GAMMA_CTD_short_i), SEQ ID NO: 261 (GAMMA_CTD_short_i), SEQ ID NO: 265 (DELTA-Plus_CTD_short_i), SEQ ID NO: 269 (MU_CTD_short_i), SEQ ID NO: 273 (A.30_CTD_short_i), SEQ ID NO: 277 (DELTA-Plus+MU_CTD_short_i), SEQ ID NO: 281 (DELTA-Plus+A.30_CTD_short_i), SEQ ID NO: 285 (BETA_CTD_short_i)₂), SEQ ID NO: 289 ((GAMMA_CTD_short_i)₂), SEQ ID NO: 293 ((DELTA_CTD_short_i)₂), SEQ ID NO: 297 ((DELTA-Plus_CTD_short_i)₂), SEQ ID NO: 301 ((MU_CTD_short_i)₂), SEQ ID NO: 305 ((A.30_CTD_short_i)₂), SEQ ID NO: 309 ((DELTA-Plus+MU_CTD_short_i)₂), SEQ ID NO: 313 ((DELTA-Plus+A.30_CTD_short_i)₂), SEQ ID NO: 317 (Omicron_Boost_CTD_short_i), SEQ ID NO: 321 ((Omicron_Boost_CTD_short_i)₂), SEQ ID NO: 325 (Omicron_CTD_short_i), SEQ ID NO: 329 ((Omicron_CTD_short_i)₂), SEQ ID NO: 333 (OΔ+μ_1_CTD_short_i), SEQ ID NO: 337 ((OΔ+μ_1_CTD_short_i)₂), SEQ ID NO: 341 (OΔ+μ_2_CTD_short_i), SEQ ID NO: 345 ((OΔ+μ_2_CTD_short_i)₂), SEQ ID NO: 349 (OΔ+μ_3_CTD_short_i), SEQ ID NO: 353 ((Δ+μ_3_CTD_short_i)₂), SEQ ID NO: 357 (Δ+μ_4_CTD_short_i), SEQ ID NO: 361 ((OΔ+μ_4_CTD_short_i)₂), SEQ ID NO: 365 (CTD-gCd01), SEQ ID NO: 366 (CTD-gCd02), SEQ ID NO: 367 (CTD-gCd03), SEQ ID NO: 368 (CTD-gCd04), SEQ ID NO: 369 (CTD-gCd05), SEQ ID NO: 370 (CTD-gCd06), SEQ ID NO: 371 (CTD-gCd07), SEQ ID NO: 372 (CTD-gCd08), SEQ ID NO: 373 (CTD-gCd09), SEQ ID NO: 374 (CTD-gCd10), SEQ ID NO: 375 (CTD-gCd11), SEQ ID NO: 376 (CTD-gCd12), SEQ ID NO: 377 (CTD-gCd13), SEQ ID NO: 378 (CTD-gCd14), SEQ ID NO: 379 (CTD-gCd15), SEQ ID NO: 380 (CTD-gCd16), SEQ ID NO: 381 (CTD-gCd17), SEQ ID NO: 382 (CTD-gCd18), SEQ ID NO: 383 (CTD-gCd19), SEQ ID NO: 384 (CTD-gCd20), SEQ ID NO: 385 (CTD-gCd21), SEQ ID NO: 386 (CTD-gCd22), SEQ ID NO: 387 (CTD-gCd23), SEQ ID NO: 388 (CTD-gCd24), SEQ ID NO: 389 (CTD-gCd25), SEQ ID NO: 390 (CTD-gCd26), SEQ ID NO: 391 (CTD-gCd27), SEQ ID NO: 392 (CTD-gCd28), SEQ ID NO: 393 (CTD-gCd29), SEQ ID NO: 394 (CTD-gCd30), SEQ ID NO: 395 (CTD-gCd31), SEQ ID NO: 396 (CTD-gCd32), SEQ ID NO: 397 (CTD-gCd33), SEQ ID NO: 398 (CTD-gCd34), SEQ ID NO: 399 (CTD-gCd35), SEQ ID NO: 400 (CTD-gCd36), SEQ ID NO: 401 (CTD-gCd37), SEQ ID NO: 402 (CTD-gCd38), SEQ ID NO: 403 (CTD-gN01), SEQ ID NO: 404 (CTD-gN02), SEQ ID NO: 405 (CTD-gN03), SEQ ID NO: 406 (CTD-gN04), SEQ ID NO: 407 (CTD-gN05), SEQ ID NO: 408 (CTD-gN06), SEQ ID NO: 409 (CTD-gN07), SEQ ID NO: 410 (CTD-gN08), SEQ ID NO: 411 (CTD-gN09), SEQ ID NO: 412 (CTD-gN10), SEQ ID NO: 413 (CTD-gN11), SEQ ID NO: 414 (CTD-gN12), SEQ ID NO: 415 (CTD-gN13) SEQ ID NO: 416 (CTD-gN14), SEQ ID NO: 417 (CTD-gN15), SEQ ID NO: 418 (CTD-gN16), SEQ ID NO: 419 (CTD-gN17), SEQ ID NO: 420 (CTD-gN18), SEQ ID NO: 421 (CTD-gN19), SEQ ID NO: 422 (CTD-gN20), SEQ ID NO: 423 (CTD-gN21), SEQ ID NO: 424 (CTD-gN22), SEQ ID NO: 425 (CTD-gN23), SEQ ID NO: 426 (CTD-gN24), SEQ ID NO: 427 (CTD-gN25), SEQ ID NO: 428 (CTD-gN26), SEQ ID NO: 429 (CTD-gN27), SEQ ID NO: 430 (CTD-gN28), SEQ ID NO: 431 (CTD-gN29), SEQ ID NO: 432 (CTD-gN30), SEQ ID NO: 433 (CTD-gN31), SEQ ID NO: 434 (CTD-gN32), SEQ ID NO: 435 (CTD-gN33), SEQ ID NO: 436 (CTD-gN34), SEQ ID NO: 437 (CTD-gN35), SEQ ID NO: 438 (CTD-gN36), SEQ ID NO: 439 (CTD-gN37), SEQ ID NO: 440 (CTD-gN38), SEQ ID NO: 441 (CTD-gN39), SEQ ID NO: 442 (CTD-gN40), SEQ ID NO: 443 (CTD-gN41), SEQ ID NO: 444 (CTD-gN42), SEQ ID NO: 445 (CTD-gN43), SEQ ID NO: 446 (CTD-gN44), SEQ ID NO: 447 (CTD-gN45), SEQ ID NO: 448 (CTD-gN46), SEQ ID NO: 449 (CTD-gN47), and SEQ ID NOs: 705-716.

[0072] (7) The recombinant polypeptide of aspect 5, wherein each of the at least two immunogenic fragments comprises an amino acid sequence selected from the group consisting of SEQ ID NOS: 245, 249, 253, 257, 261, 265, 269, 273, 277, 281, 285, 289, 293, 297, 301, 305, 309, 313, 317, 321, 325, 329, 333, 337, 341, 345, 349, 353, 357, 361, 365-449, and 705-716.

[0073] (8) The recombinant polypeptide of any one of aspects 5-7, wherein each immunogenic fragment of the at least two immunogenic fragments comprises the same amino acid sequence.

[0074] (9) The recombinant polypeptide of any one of aspects 5-8, wherein each immunogenic fragment of the at least two immunogenic fragments comprises a different amino acid sequence from the other immunogenic fragments.

[0075] (10) The recombinant polypeptide of any one of aspects 1-9, wherein the polypeptide comprises two, three, four, or five immunogenic fragments.

[0076] (11) The recombinant polypeptide of any one of aspects 5-10, wherein the at least two immunogenic fragments are connected to each other via a linker.

[0077] (12) The recombinant polypeptide of aspect 11, wherein the linker is a polypeptide comprising an amino acid sequence of 1-35 residues, wherein each residue is independently serine or glycine.

[0078] (13) The recombinant polypeptide of any one of aspects 1-12, wherein the at least one immunogenic fragment of the SARS-COV-2 spike glycoprotein is connected to the antibody Fc region via a linker.

[0079] (14) The recombinant polypeptide of aspect 13, wherein the linker comprises an amino acid sequence selected from the group consisting of SEQ ID NO: 65 (Fc1), SEQ ID NO: 67 (Fc1-TEV), SEQ ID NO: 69 (Fc1-Rv3C), SEQ ID NO: 193 (Short), SEQ ID NO: 195 (Medium), and SEQ ID NO: 197 (Long).

[0080] (15) The recombinant polypeptide of any one of aspects 1-14, wherein the antibody Fc region is from a human IgG1 antibody or derived therefrom.

[0081] (16) The recombinant polypeptide of aspect 15, wherein the antibody Fc region comprises the amino acid sequence of SEQ ID NO: 71.

[0082] (17) The recombinant polypeptide of any one of aspects 1-16, wherein the polypeptide comprises an amino acid sequence with at least 90%, preferably at least 91%, 92%, 93%, 94%, 95%, 96%, 97%, 98%, or 99%, sequence identity to an amino acid sequence selected from the group consisting of SEQ ID NO: 247 (CTD_short_h) 2-Fc), SEQ ID NO: 251 (LS2435 Single domain_(GAMMA-Plus)-Fc), SEQ ID NO: 255 (BETA_CTD_short_i-Fc), SEQ ID NO: 259 (GAMMA_CTD_short_i-Fc), SEQ ID NO: 263 (GAMMA_CTD_short_i-Fc), SEQ ID NO: 267 (DELTA-Plus_CTD_short_i-Fc), SEQ ID NO: 271 (MU_CTD_short_i-Fc), SEQ ID NO: 275 (A.30_CTD_short_i-Fc), SEQ ID NO: 279 (DELTA-Plus+MU_CTD_short_i-Fc), SEQ ID NO: 283 (DELTA-Plus+A.30_CTD_short_i-Fc), SEQ ID NO: 287 (BETA_CTD_short_i)₂-Fc), SEQ ID NO: 291 ((GAMMA_CTD_short_i)₂-Fc), SEQ ID NO: 295 ((DELTA_CTD_short_i)₂-Fc), SEQ ID NO: 299 ((DELTA-Plus_CTD_short_i)₂-Fc), SEQ ID NO: 303 ((MU_CTD_short_i)₂-Fc), SEQ ID NO: 307 ((A.30_CTD_short_i)₂-Fc), SEQ ID NO: 311 ((DELTA-Plus+MU_CTD_short_i)₂-Fc), SEQ ID NO: 315 ((DELTA-Plus+A.30_CTD_short_i)₂-Fc), SEQ ID NO: 319 (Omicron_Boost_CTD_short_i-Fc), SEQ ID NO: 323 ((Omicron_Boost_CTD_short_i)₂-Fc), SEQ ID NO: 327 (Omicron_CTD_short_i-Fc), SEQ ID NO: 331 ((Omicron_CTD_short_i)₂-Fc), SEQ ID NO: 335 (OΔ+μ_1_CTD_short_i-Fc), SEQ ID NO: 339 ((OΔ+μ_1_CTD_short_i)₂-Fc), SEQ ID NO: 343 (OΔ+μ_2_CTD_short_i-Fc), SEQ ID NO: 347 ((OΔ+μ_2_CTD_short_i)₂-Fc), SEQ ID NO: 351 (OΔ+μ_3_CTD_short_i-Fc), SEQ ID NO: 355 ((OΔ+μ_3_CTD_short_i)₂-Fc), SEQ ID NO: 359 (OΔ+μ_4_CTD_short_i-Fc), SEQ ID NO: 363 ((OΔ+μ_4_CTD_short_i)₂-Fc),), SEQ ID NO: 535 (CTD-gCd01-Fc), SEQ ID NO: 536 (CTD-gCd02-Fc), SEQ ID NO: 537 (CTD-gCd03-Fc), SEQ ID NO: 538 (CTD-gCd04-Fc), SEQ ID NO: 539 (CTD-gCd05-Fc), SEQ ID NO: 540 (CTD-gCd06-Fc), SEQ ID NO: 541 (CTD-gCd07-Fc), SEQ ID NO: 542 (CTD-gCd08-Fc), SEQ ID NO: 543 (CTD-gCd09-Fc), SEQ ID NO: 544 (CTD-gCd10-Fc), SEQ ID NO: 545 (CTD-gCd11-Fc), SEQ ID NO: 546 (CTD-gCd12-Fc), SEQ ID NO: 547 (CTD-gCd13-Fc), SEQ ID NO: 548 (CTD-gCd14-Fc), SEQ ID NO: 549 (CTD-gCd15-Fc), SEQ ID NO: 550 (CTD-gCd16-Fc), SEQ ID NO: 551 (CTD-gCd17-Fc), SEQ ID NO: 552 (CTD-gCd18-Fc), SEQ ID NO: 553 (CTD-gCd19-Fc), SEQ ID NO: 554 (CTD-gCd20-Fc), SEQ ID NO: 555 (CTD-gCd21-Fc), SEQ ID NO: 556 (CTD-gCd22-Fc), SEQ ID NO: 557 (CTD-gCd23-Fc), SEQ ID NO: 558 (CTD-gCd24-Fc), SEQ ID NO: 559 (CTD-gCd25-Fc), SEQ ID NO: 560 (CTD-gCd26-Fc), SEQ ID NO: 561 (CTD-gCd27-Fc), SEQ ID NO: 562 (CTD-gCd28-Fc), SEQ ID NO: 563 (CTD-gCd29-Fc), SEQ ID NO: 564 (CTD-gCd30-Fc), SEQ ID NO: 565 (CTD-gCd31-Fc), SEQ ID NO: 566 (CTD-gCd32-Fc), SEQ ID NO: 567 (CTD-gCd33-Fc), SEQ ID NO: 568 (CTD-gCd34-Fc), SEQ ID NO: 569 (CTD-gCd35-Fc), SEQ ID NO: 570 (CTD-gCd36-Fc), SEQ ID NO: 571 (CTD-gCd37-Fc), SEQ ID NO: 572 (CTD-gCd38-Fc), SEQ ID NO: 573 (CTD-gN01-Fc), SEQ ID NO: 574 (CTD-gN02), SEQ ID NO: 575 (CTD-gN03-Fc), SEQ ID NO: 576 (CTD-gN04-Fc), SEQ ID NO: 577 (CTD-gN05-Fc), SEQ ID NO: 578 (CTD-gN06-Fc), SEQ ID NO: 579 (CTD-gN07-Fc), SEQ ID NO: 580 (CTD-gN08-Fc), SEQ ID NO: 581 (CTD-gN09-Fc), SEQ ID NO: 582 (CTD-gN10-Fc), SEQ ID NO: 583 (CTD-gN11-Fc), SEQ ID NO: 584 (CTD-gN12-Fc), SEQ ID NO: 585 (CTD-gN13-Fc) SEQ ID NO: 586 (CTD-gN14-Fc), SEQ ID NO: 587 (CTD-gN15-Fc), SEQ ID NO: 588 (CTD-gN16-Fc), SEQ ID NO: 589 (CTD-gN17-Fc), SEQ ID NO: 590 (CTD-gN18-Fc), SEQ ID NO: 591 (CTD-gN19-Fc), SEQ ID NO: 592 (CTD-gN20-Fc), SEQ ID NO: 593 (CTD-gN21-Fc), SEQ ID NO: 594 (CTD-gN22-Fc), SEQ ID NO: 595 (CTD-gN23-Fc), SEQ ID NO: 596 (CTD-gN24-Fc), SEQ ID NO: 597 (CTD-gN25-Fc), SEQ ID NO: 598 (CTD-gN26-Fc), SEQ ID NO: 599 (CTD-gN27-Fc), SEQ ID NO: 600 (CTD-gN28-Fc), SEQ ID NO: 601 (CTD-gN29-Fc), SEQ ID NO: 602 (CTD-gN30-Fc), SEQ ID NO: 603 (CTD-gN31-Fc), SEQ ID NO: 604 (CTD-gN32-Fc), SEQ ID NO: 605 (CTD-gN33-Fc), SEQ ID NO: 606 (CTD-gN34-Fc), SEQ ID NO: 607 (CTD-gN35-Fc), SEQ ID NO: 608 (CTD-gN36-Fc), SEQ ID NO: 609 (CTD-gN37-Fc), SEQ ID NO: 610 (CTD-gN38-Fc), SEQ ID NO: 611 (CTD-gN39-Fc), SEQ ID NO: 612 (CTD-gN40-Fc), SEQ ID NO: 613 (CTD-gN41-Fc), SEQ ID NO: 614 (CTD-gN42-Fc), SEQ ID NO: 615 (CTD-gN43-Fc), SEQ ID NO: 616 (CTD-gN44-Fc), SEQ ID NO: 617 (CTD-gN45-Fc), SEQ ID NO: 618 (CTD-gN46-Fc), SEQ ID NO: 619 (CTD-gN47), and SEQ ID NOs: 705-716.

[0083] (18) The recombinant polypeptide of aspect 17, wherein the polypeptide comprises an amino acid sequence selected from the group consisting of SEQ ID NOS: 247, 251, 255, 259, 263, 267, 271, 275, 279, 283, 287, 291, 295, 299, 303, 307, 311, 315, 319, 323, 327, 331, 335, 339, 343, 347, 351, 355, 359, 363, 535-619, and SEQ ID NOs: 705-716.

[0084] (19) A recombinant polynucleotide encoding the recombinant polypeptide of any one of aspects 1-18.

[0085] (20) The recombinant polynucleotide of aspect 19, wherein the polynucleotide comprises a nucleic acid sequence with at least 90%, preferably at least 91%, 92%, 93%, 94%, 95%, 96%, 97%, 98%, or 99%, sequence identity to a nucleic acid sequence selected from the group consisting of SEQ ID NO: 248 (CTD_short_h) 2-Fc), SEQ ID NO: 252 (LS2435 Single domain_(GAMMA-Plus)-Fc), SEQ ID NO: 256 (BETA_CTD_short_i-Fc), SEQ ID NO: 260 (GAMMA_CTD_short_i-Fc), SEQ ID NO: 264 (GAMMA_CTD_short_i-Fc), SEQ ID NO: 268 (DELTA-Plus_CTD_short_i-Fc), SEQ ID NO: 272 (MU_CTD_short_i-Fc), SEQ ID NO: 276 (A.30_CTD_short_i-Fc), SEQ ID NO: 280 (DELTA-Plus+MU_CTD_short_i-Fc), SEQ ID NO: 284 (DELTA-Plus+A.30_CTD_short_i-Fc), SEQ ID NO: 288 (BETA_CTD_short_i)₂-Fc), SEQ ID NO: 292 ((GAMMA_CTD_short_i)₂-Fc), SEQ ID NO: 296 ((DELTA_CTD_short_i)₂-Fc), SEQ ID NO: 300 ((DELTA-Plus_CTD_short_i)₂-Fc), SEQ ID NO: 304 ((MU_CTD_short_i)₂-Fc), SEQ ID NO: 308 ((A.30_CTD_short_i)₂-Fc), SEQ ID NO: 312 ((DELTA-Plus+MU_CTD_short_i)₂-Fc), SEQ ID NO: 316 ((DELTA-Plus+A.30_CTD_short_i)₂-Fc), SEQ ID NO: 320 (Omicron_Boost_CTD_short_i-Fc), SEQ ID NO: 324 ((Omicron_Boost_CTD short_i)₂-Fc), SEQ ID NO: 328 (Omicron_CTD_short_i-Fc), SEQ ID NO: 332 ((Omicron_CTD short_i)₂-Fc), SEQ ID NO: 336 (OΔ+μ_1_CTD_short_i-Fc), SEQ ID NO: 340 ((Δ+μ-1_CTD_short_i)₂-Fc), SEQ ID NO: 344 (Δ+μ_2_CTD_short_i-Fc), SEQ ID NO: 348 ((Δ+μ-2_CTD_short_i)₂-Fc), SEQ ID NO: 352 (Δ+μ_3_CTD_short_i-Fc), SEQ ID NO: 356 ((Δ+μ_3_CTD_short_i)₂-Fc), SEQ ID NO: 360 (Δ+μ_4_CTD_short_i-Fc), SEQ ID NO: 364 ((OΔ+μ_4_CTD_short_i)₂-Fc), SEQ ID NO: 620 (CTD-gCd01-Fc), SEQ ID NO: 621 (CTD-gCd02-Fc), SEQ ID NO: 622 (CTD-gCd03-Fc), SEQ ID NO: 623 (CTD-gCd04-Fc), SEQ ID NO: 624 (CTD-gCd05-Fc), SEQ ID NO: 625 (CTD-gCd06-Fc), SEQ ID NO: 626 (CTD-gCd07-Fc), SEQ ID NO: 627 (CTD-gCd08-Fc), SEQ ID NO: 628 (CTD-gCd09-Fc), SEQ ID NO: 629 (CTD-gCd10-Fc), SEQ ID NO: 630 (CTD-gCd11-Fc), SEQ ID NO: 631 (CTD-gCd12-Fc), SEQ ID NO: 632 (CTD-gCd13-Fc), SEQ ID NO: 633 (CTD-gCd14-Fc), SEQ ID NO: 634 (CTD-gCd15-Fc), SEQ ID NO: 635 (CTD-gCd16-Fc), SEQ ID NO: 636 (CTD-gCd17-Fc), SEQ ID NO: 637 (CTD-gCd18-Fc), SEQ ID NO: 638 (CTD-gCd19-Fc), SEQ ID NO: 639 (CTD-gCd20-Fc), SEQ ID NO: 640 (CTD-gCd21-Fc), SEQ ID NO: 641 (CTD-gCd22-Fc), SEQ ID NO: 642 (CTD-gCd23-Fc), SEQ ID NO: 643 (CTD-gCd24-Fc), SEQ ID NO: 644 (CTD-gCd25-Fc), SEQ ID NO: 645 (CTD-gCd26-Fc), SEQ ID NO: 646 (CTD-gCd27-Fc), SEQ ID NO: 647 (CTD-gCd28-Fc), SEQ ID NO: 648 (CTD-gCd29-Fc), SEQ ID NO: 649 (CTD-gCd30-Fc), SEQ ID NO: 650 (CTD-gCd31-Fc), SEQ ID NO: 651 (CTD-gCd32-Fc), SEQ ID NO: 652 (CTD-gCd33-Fc), SEQ ID NO: 653 (CTD-gCd34-Fc), SEQ ID NO: 654 (CTD-gCd35-Fc), SEQ ID NO: 655 (CTD-gCd36-Fc), SEQ ID NO: 656 (CTD-gCd37-Fc), SEQ ID NO: 657 (CTD-gCd38-Fc), SEQ ID NO: 658 (CTD-gN01-Fc), SEQ ID NO: 659 (CTD-gN02), SEQ ID NO: 660 (CTD-gN03-Fc), SEQ ID NO: 661 (CTD-gN04-Fc), SEQ ID NO: 662 (CTD-gN05-Fc), SEQ ID NO: 663 (CTD-gN06-Fc), SEQ ID NO: 664 (CTD-gN07-Fc), SEQ ID NO: 665 (CTD-gN08-Fc), SEQ ID NO: 666 (CTD-gN09-Fc), SEQ ID NO: 667 (CTD-gN10-Fc), SEQ ID NO: 668 (CTD-gN11-Fc), SEQ ID NO: 669 (CTD-gN12-Fc), SEQ ID NO: 670 (CTD-gN13-Fc) SEQ ID NO: 671 (CTD-gN14-Fc), SEQ ID NO: 672 (CTD-gN15-Fc), SEQ ID NO: 673 (CTD-gN16-Fc), SEQ ID NO: 674 (CTD-gN17-Fc), SEQ ID NO: 675 (CTD-gN18-Fc), SEQ ID NO: 676 (CTD-gN19-Fc), SEQ ID NO: 677 (CTD-gN20-Fc), SEQ ID NO: 678 (CTD-gN21-Fc), SEQ ID NO: 679 (CTD-gN22-Fc), SEQ ID NO: 680 (CTD-gN23-Fc), SEQ ID NO: 681 (CTD-gN24-Fc), SEQ ID NO: 682 (CTD-gN25-Fc), SEQ ID NO: 683 (CTD-gN26-Fc), SEQ ID NO: 684 (CTD-gN27-Fc), SEQ ID NO: 685 (CTD-gN28-Fc), SEQ ID NO: 686 (CTD-gN29-Fc), SEQ ID NO: 687 (CTD-gN30-Fc), SEQ ID NO: 688 (CTD-gN31-Fc), SEQ ID NO: 689 (CTD-gN32-Fc), SEQ ID NO: 690 (CTD-gN33-Fc), SEQ ID NO: 691 (CTD-gN34-Fc), SEQ ID NO: 692 (CTD-gN35-Fc), SEQ ID NO: 693 (CTD-gN36-Fc), SEQ ID NO: 694 (CTD-gN37-Fc), SEQ ID NO: 695 (CTD-gN38-Fc), SEQ ID NO: 696 (CTD-gN39-Fc), SEQ ID NO: 697 (CTD-gN40-Fc), SEQ ID NO: 698 (CTD-gN41-Fc), SEQ ID NO: 699 (CTD-gN42-Fc), SEQ ID NO: 700 (CTD-gN43-Fc), SEQ ID NO: 701 (CTD-gN44-Fc), SEQ ID NO: 702 (CTD-gN45-Fc), SEQ ID NO: 703 (CTD-gN46-Fc), SEQ ID NO: 704 (CTD-gN47), and SEQ ID NOs: 717-728.

[0086] (21) The recombinant polynucleotide of aspect 20, wherein the polynucleotide comprises a nucleic acid sequence selected from the group consisting of SEQ ID NO: 248, 252, 256, 260, 264, 268, 272, 276, 280, 284, 288, 292, 296, 300, 304, 308, 312, 316, 320, 324, 328, 332, 336, 340, 344, 348, 352, 356, 360, 364, 620-704, and 717-728.

[0087] (22) The recombinant polynucleotide of any one of aspects 19-21, wherein the nucleic acid sequence has been codon optimized.

[0088] (23) A pharmaceutical composition comprising the recombinant polypeptide of any one of aspects 1-18 or the polypeptide encoded by the recombinant polynucleotide of any one of aspects 19-22, and a pharmaceutically acceptable carrier.

[0089] (24) The pharmaceutical composition of aspect 23, wherein the pharmaceutical composition further comprises at least one adjuvant.

[0090] (25) The pharmaceutical composition of aspect 24, wherein the at least one adjuvant is selected from the group consisting of alum adjuvants, emulsion adjuvants, and pattern recognition receptor agonist adjuvants.

[0091] (26) The pharmaceutical composition of aspect 25, wherein the at least one adjuvant is MF59, Squalene Emulsion, Alum, aluminum hydroxide gels, calcium phosphate hydroxide, paraffin oil, cytokines (IL-1, IL-2, IL-12), killed bacterial products such as Bordetella and Mycobacterium bacteria, bacterial toxoids, squalene and DL-α-tocopherol emulsions, aluminum phosphate gels, saponins, cyclic dinucleotides, and TLR agonists, preferably TLR1, TLR2, TLR4, TLR5, TLR7, TLR8, TLR9 etc., and combinations thereof.

[0092] (27) The pharmaceutical composition of aspect 24, wherein the at least one adjuvant is a squalene-oil-in-water emulsion adjuvant.

[0093] (28) A vector comprising the recombinant polynucleotide of any one of aspects 19-22.

[0094] (29) An isolated cell comprising the recombinant polypeptide of any one of aspects 1-18, or the polypeptide encoded by the recombinant polynucleotide of any one of aspects 19-22.

[0095] (30) A method for preventing, inhibiting, reducing, eliminating, protecting, or delaying the onset of an infection or an infectious clinical condition caused by a beta coronavirus in a subject comprising administering to the subject the recombinant polypeptide of any one of aspects 1-18, the polypeptide encoded by the recombinant polynucleotide of any one of aspects 19-22, or the pharmaceutical composition of any one of aspects 23-27.

[0096] (31) A method for inducing an immune response against a beta coronavirus in a subject comprising administering to the subject the recombinant polypeptide of any one of aspects 1-18, the polypeptide encoded by the recombinant polynucleotide of any one of aspects 19-22, or the pharmaceutical composition of any one of aspects 23-27.

[0097] (32) The method of aspect 30 or 31, wherein the recombinant polypeptide of any one of aspects 1-18, the polypeptide encoded by the recombinant polynucleotide of any one of aspects 19-22, or the pharmaceutical composition of any one of aspects 23-27 is administered by oral, parenteral, subcutaneous, intravenous, intramuscular, intranasal, intrapulmonary, intraarterial, intrathecal, or interperitoneal administration.

[0098] (33) The method of any one of aspects 30-32, wherein the coronavirus is selected from the group consisting of SARS-COV-2, SARS-COV, and MERS-COV.

[0099] (34) The method of any one of aspects 30-33, wherein the subject is a mammal, preferably a human or non-human primate.

[0100] (35) The use of the recombinant polypeptide of any one of aspects 1-18, the polypeptide encoded by the recombinant polynucleotide of any one of aspects 19-22, or the pharmaceutical composition of any one of aspects 23-27 for the preparation of a medicament for the treatment or prevention of illness caused by SARS-COV-2.

[0101] (36) The recombinant polypeptide of any one of aspects 1-18, the polypeptide encoded by the recombinant polynucleotide of any one of aspects 19-22, or the pharmaceutical composition of any one of aspects 23-27 for use as a medicament.

### EXAMPLES

[0102] The following descriptions of cloning and protein expression apply to each example.

[0103] Cloning: Inserts encoding a certain fragment of SARS COV-2 virus Spike protein S1 were designed based prediction and previous Lytic Solutions expression data. Codon optimized cDNA was synthesized. The insert was cloned using either (a) restriction digests and DNA ligations or (b) NEB HiFi DNA assembly builder mix into a pcDNA3.1 vector containing appropriate secretion signal sequences, linkers, and tags for secreted fusion protein expression, as well as sequence encoding a human IgG1 Fc region. The resulting clone encoding a recombinant SARS COV-2 Spike protein fragment-Fc region fusion protein (“recombinant CoV-2 fusion protein”) was verified by either colony PCR and/or restriction digests. DNA sequencing was also used.

[0104] Protein Expression: Supercoiled plasmid of the verified clone was transiently transfected into CHO-S cells and expressed under the control of a constitutive promoter within cell culture conditions ranging from 30-37° C. and 3-10 days in CO₂ (8%) incubators with rotary shaking agitation at speeds of 150 RPM. Cells were removed by centrifugation and culture medium containing the recombinant CoV-2 fusion protein were passed over Protein A agarose to bind the Fc region-containing CoV-2 protein. Filtration could also have been used to remove cells. The column containing bound recombinant CoV-2 fusion protein was washed with phosphate buffered saline. The recombinant CoV-2 fusion protein bound to the Protein A column was eluted with low pH glycine followed by neutralization in pH8.0 Tris. The recombinant CoV-2 fusion protein was dialyzed to remove glycine/tris and placed into HEPES-buffered saline (10 mM HEPES. 150 mM NaCl, pH adjusted with NaOH to pH 7.2-7.5). No additional purification was employed in this case. However, additional purification by any chromatography method such as HIC or ion exchange can optionally be used.

### Example 1

[0105] SARS COV-2 antigens were selected from the genomic sequence (ncbi.nlm.nih.gov/nuccore/MN908947) to use in generating antibody and T-cell responses to the receptor binding domains of SARS COV-2 virus Spike protein. The selected domain encoding regions were codon optimized for CHO cell expression using IDTDNA codon optimization algorithms. Template DNA was synthesized at Twist Bio. A modified pcDNA3.1 vector was used for protein expression that included human IgG1 Fc for translational fusion generation, i.e., a fusion protein containing a SARS COV-2 virus Spike protein fragment and an antibody Fc region. The vector encoding the fusion protein was expressed in CHO cells, in which the fusion protein was secreted to the media, cells and cell debris were removed by centrifugation, the recombinant protein was captured with Protein A resin, and eluted with low pH glycine buffer. The resulting fusion protein was buffer exchanged by dialysis and mixed with adjuvant. The resulting vaccine composition was injected intramuscularly into Cynomolgus monkeys. The vaccine composition generated an unexpectedly strong immune response in Cynomolgus monkeys.

[0106] Vaccination: Following protein expression in accordance with the description above, the purified recombinant CoV-2 fusion protein (LS2330, CTD_short-a-Fc; SEQ ID NO: 73) was mixed with Titermax Gold adjuvant, a modified squalene in water emulsion adjuvant, according to manufacturer directions, and injected intramuscularly into the thigh of Cynomolgus monkeys. Injections were performed at day 0 and day 14. Dosages were 250 ug of antigen of CTD_short-a-Fc (Seq ID NO:73). Prior to the first injection on day 0, a baseline sample was collected from each test subject.

[0107] The immune response was monitored every two weeks following the injection on day 0, with the earliest sample taken on day 14. Accordingly, samples were collected on day 14 and day 28. The samples were analyzed, and the results are shown in FIG. 1. Venous blood was obtained from Cynomolgus monkeys pre immunization in EDTA-containing vacutubes (value shown as Day 0 serum sample in FIG. 1). Immediately after the pre-immunization blood sample was taken, monkeys were immunized with CTD_short-a-Fc (Seq ID NO:73). Serum was isolated by centrifugation of the non-coagulated blood. Serum was diluted 1:100 and analyzed on Intuitive Biosciences ELISA platform for anti-S1 spike binding antibodies. Additional time points were taken at 2 weeks post Day 0, 4 weeks post Day 0, and 6 weeks post Day 0. The single immune boost (CTD_short-a-Fc (Seq ID NO:73)) was performed immediately after the 2 week blood sample was taken. Samples were processed similar to Day 0 samples and immune response was recorded as Relative Intensity Units (RIU) on Intuitive Bioscience ELISA platform. Capture of anti-SARS COV-2 antibodies was performed by spotting SARS COV-2 S1 spike protein (Sino Biologicals) onto the wells of Intuitive Bioscience ELISA platform 96 well plates, adding diluted serum-full concentration serum and dilutions to 1:200 serum: buffer were used, but higher concentrations of serum surprisingly resulted in a signal too strong to read on the platform, thus requiring a 1:200 fold dilution for the readings shown in FIG. 1- and incubating for 10-120 minutes to allow binding of anti-CTD antibodies to the S1 spike protein attached to the plate wells. Serum was washed 3× form the wells, and followed by application of anti-cynomolgus detection antibody to the well, incubated for 10-120 minutes, then washed 3× from the well. Detection reagents were added and the signal was quantified compared to control spots of unrelated proteins.

[0108] FIG. 1 depicts an unexpectedly strong immune response in Cynomolgus monkeys to the tested construct, particularly in comparison to the immune response generated by other known SARS-COV-2 constructs. See, for instance, Graham et al., “Evaluation of the immunogenicity of prime-boost vaccination with the replication-deficient viral vectored COVID-19 vaccine candidate ChAOx1 nCOV-19,” bioRxiv preprint doi: doi.org/10.1101/2020.06.20.159715 (posted Jun. 20, 2020)

[0109] Neutralization Assays: FIGS. 5A-C depict the results of neutralization assays done on the tested Cynomolgus monkeys P0101 and P0102 (respectively depicted as “Animal 101” and “Animal 102” in FIG. 1). Regarding FIGS. 5A and 5B, “wpi” in the legend denotes weeks post injection/immunization. SARS-COV-2 pseudotyped particles were generated as previously described (see Schmidt, F., et al. Measuring SARS-COV-2 neutralizing antibody activity using pseudotyped and chimeric viruses. J Exp Med, v. 217, n. 11, 11 2020). Briefly, 293T cells were transfected with pHIV-1NLGagPol, pCCNG/nLuc and pSARS-COV-2-SΔ19. Particles were harvested 48 hours after transfection, filtered and stored at −80° C. Fourfold serially diluted serum from the immunized monkeys was incubated with SARS-COV-2 pseudotyped virus for 1 h at 37° C. The mixture was subsequently incubated with 293T/ACE2cl.22 cells (plated on Poly-D-Lysine-coated 96-well plates) with the final starting dilution of serum being 1:50. At 48 h later the cells were washed with PBS and lysed with Luciferase Cell Culture Lysis 5× reagent (Promega). Nanoluc Luciferase activity in lysates was measured using the Nano-Glo Luciferase Assay System (Promega) with the Modulus II Microplate Reader (Turner BioSystems). The raw nanoluc luciferase activity values (relative luminescence units) were normalized to those derived from cells infected with SARS-COV-2 pseudotyped virus in the absence of serum or a rabbit monoclonal antibody diluted in normal human serum at 0.105 mg/mL (40592-R001, Sinobiological, Wayne, PA). The half-maximal inhibitory concentration for serum (NT50) was determined using four-parameter nonlinear regression (GraphPad Prism).

[0110] Immunization of the two Cynomolgus macaques (IDs: P0101 and P0102) with SEQ ID NO: 73 (LS2330 [CTD_short_a-Fc] produced robust neutralizing antibody response. Neutralization assays were performed using a replication-defective single-cycle pseudotyped virus carrying SARS-COV-2 spikes and the NanoLuc luciferase reporter. This assay has been previously shown to accurately predict serum neutralizing activity against authentic SARS-COV-2 (see Schmidt, F., et al. referenced above). As a control for neutralization sensitivity, human serum obtained from a SARS-COV-2 negative individual was used alone or spiked with a monoclonal neutralizing antibody (FIG. 5C). Serum samples collected at the various timepoints from 0 to 20 weeks post-immunization were evaluated for neutralizing activity. Sera from animals immunized with SEQ ID NO: 73 (LS2330 [CTD_short_a-Fc] had readily detectable neutralization activity, as early as 2 weeks post-immunization that significantly increased until weeks 4 to 8 of the study. Indeed, neutralizing titers were exceptionally high at 4-8 weeks after immunization, in the range of 10,000 to 100,000 and were maintained in the 1000 to 10,000 range at 20 weeks after immunization.

### Example 2

[0111] Overview: SARS COV-2 antigens were selected from the SARS COV-2 genomic sequence (ncbi.nlm.nih.gov/nuccore/MN908947) to use in generating antibody and T-cell responses to the receptor binding domains of SARS COV-2 virus Spike protein. Preliminary data identified select individual regions of the SARS COV-2 virus Spike protein that would be amenable to high-level expression as Fc-fusions, that are resistant to proteolysis when expressed in CHO cells, and that generate strong immune response in Cynomolgus macaques. We further determined that in-series multimerization of select SARS COV-2 virus Spike protein domains can be used to create proteins that retain high-level expression without significant proteolysis sensitivity whilst doubling the theoretical antigenicity of the molecule to be used for immune stimulation. The design of the multiple domain molecules provides a scaffold for straight-forward modification to incorporate amino acid mutations identified in new and emerging variants of the SARS COV-2 virus Spike protein. The resulting vaccine composition of the Wuhan variant was injected intramuscularly into Rhesus macaques and elicit stronger immune responses using simple adjuvants at doses at mere fractions of that needed with single domain Fc-fusions.

[0112] Following protein expression in accordance with the description above, resulting protein was analyzed by reducing SDS-PAGE to determine protein integrity for monomeric CTD-Fcs (FIGS. 2A-D), in-series dimer CTD-Fcs (FIG. 3) and in-series dimer mutant CTD-Fcs (FIG. 4). Protein yields were calculated using absorbance of 280 nm light and protein-specific extinction coefficients determined in silico according to their expected amino acid composition. Representative protein yields are given in Table 1.

TABLE 1

| | | Expression (mg |
|---|---|---|
| | | protein/L CHO |
| Strain(s) | Insert | culture (±SD)) |
| 3472 (SEQ ID NO: 75) | CTD_long_a (SEQ ID NO: 1) | 77.3 ⁽⁵⁾ |
| 2356 (SEQ ID NO: 101) | CTD_long_b (SEQ ID NO: 7) | 60.8 ⁽⁵⁾ |
| 2357 (SEQ ID NO: 103) | CTD_long_c (SEQ ID NO: 9) | 60.8 ⁽⁵⁾ |
| 2358 (SEQ ID NO: 105) | CTD_long_d (SEQ ID NO: 11) | 65.8 ⁽⁵⁾ |
| 2359 (SEQ ID NO: 107) | CTD_long_e (SEQ ID NO: 13) | 96.1 ⁽⁵⁾ |
| 2360 (SEQ ID NO: 109) | CTD_long_f (SEQ ID NO: 15) | 95.1 ⁽⁵⁾ |
| 2361 (SEQ ID NO: 111) | CTD_long_g (SEQ ID NO: 17) | 74.5 ⁽⁵⁾ |
| 2362 (SEQ ID NO: 113) | CTD_long_h (SEQ ID NO: 19) | 108.3 ⁽⁵⁾ |
| 2363 (SEQ ID NO: 115) | CTD_long_i (SEQ ID NO: 21) | 108.5 ⁽⁵⁾ |
| 2330 (SEQ ID NO: 73) | CTD_short_a (SEQ ID NO: 23) | >40 ⁽⁵⁾ |
| 2364 (SEQ ID NO: 117) | CTD_short_b (SEQ ID NO: 25) | 131.8 ⁽⁵⁾ |
| 2365 (SEQ ID NO: 119) | CTD_short_c (SEQ ID NO: 27) | 126.5 ⁽⁵⁾ |
| 2366 (SEQ ID NO: 121) | CTD_short_d (SEQ ID NO: 29) | 106.2 ⁽⁵⁾ |
| 2367 (SEQ ID NO: 123) | CTD_short_e (SEQ ID NO: 31) | 107.5 ⁽⁵⁾ |
| 2368 (SEQ ID NO: 125) | CTD_short_f (SEQ ID NO: 33) | 109.9 ⁽⁵⁾ |
| 2369 (SEQ ID NO: 127) | CTD_short_g (SEQ ID NO: 35) | 132.4 ⁽⁵⁾ |
| 2370 (SEQ ID NO: 129) | CTD_short_h (SEQ ID NO: 37) | 67.5 ⁽⁵⁾ |
| 2371 (SEQ ID NO: 131) | CTD_short_i (SEQ ID NO: 39) | 167.7 ⁽⁵⁾ |
| 2372 (SEQ ID NO: 133) | CTD_vs_a (SEQ ID NO: 41) | 2.3 ⁽⁵⁾ |
| 2373 (SEQ ID NO: 135) | CTD_vs_b (SEQ ID NO: 43) | 1.7 ⁽⁵⁾ |
| 2374 (SEQ ID NO: 137) | CTD_vs_c (SEQ ID NO: 45) | 0.9 ⁽⁵⁾ |
| 2375 (SEQ ID NO: 139) | CTD_vs_d (SEQ ID NO: 47) | ≤0.8 ⁽⁵⁾ |
| 2376 (SEQ ID NO: 141) | CTD_vs_e (SEQ ID NO: 49) | ≤0.8 ⁽⁵⁾ |
| 2377 (SEQ ID NO: 143) | RBD_a (SEQ ID NO: 51) | ≤0.8 ⁽⁵⁾ |
| 2378 (SEQ ID NO: 145) | RBD_b (SEQ ID NO: 53) | ≤0.8 ⁽⁵⁾ |
| 2380 (SEQ ID NO: 149) | RBD_d (SEQ ID NO: 55) | ≤0.8 ⁽⁵⁾ |
| 2381 (SEQ ID NO: 151) | RBD_e (SEQ ID NO: 57) | 14.5 ⁽⁵⁾ |
| 2393 (SEQ ID NO: 155) | (RBD-tight)₂ (SEQ ID NO: 173) | ≤0.8 ⁽⁷⁾ |
| 2394 (SEQ ID NO: 157) | (RBD-extended)₂ (SEQ ID NO: | 7.4 ⁽⁷⁾ |
| | 177) | |
| 2395 ((SEQ ID NO: 159) | (RBD)₂ (SEQ ID NO: 181) | ≤0.8 ⁽⁷⁾ |
| 2397-2400 (SEQ ID NO: 161) | (CTD_short_d)₂ (SEQ ID NO: 183) | 32.2 ⁽⁴⁾/53.0 (±4) ⁽⁷⁾ |
| 2401-2404 (SEQ ID NO: 163) | (CTD_short_i)₂ (SEQ ID NO: 185) | 88.3 ⁽⁴⁾/144.7 (±5.5) ⁽⁷⁾ |
| 2421 (SEQ ID NO: 165) | [(CTD_short_i)₂-Fc; D2 mutations | 79.5 ⁽⁴⁾ |
| | for 501.V2 variant, K417N, | |
| | E484K, N501Y] (SEQ ID NO: 187) | |
| 2423 (SEQ ID NO: 167) | [(CTD_short_i)₂-Fc; D2 mutations | 55.2 ⁽⁴⁾ |
| | for hybrid P.1 and CAL.20C | |
| | variants; K417T, L452R, E484K, | |
| | N501Y] (SEQ ID NO: 189) | |
| 2435 (SEQ ID NO: 169) | [(CTD_short_i)₂-Fc; D1 and D2 | 61.2 ⁽⁴⁾ |
| | mutations for hybrid P.1 and | |
| | CAL.20C variants; K417T, L452R, | |
| | E484K, N501Y] (SEQ ID NO: 191) | |

⁽⁴⁾ 4-day expression,
⁽⁵⁾ 5-day expression,
⁽⁷⁾ 7-day expression

[0113] Based on the desire to develop methods to increase the relative antigen content of a protein molecule, in-series concatemers of RBD-containing protein fragments translationally fused to an Fc. CTD_short_d and CTD_short_i (SEQ ID NOs: 29 and 39, respectively) were prepared and selected for in-series expression given their high-level, protease resistant expression as monomers. When conjoined with a serine-glycine linker and expressed in CHO cells, the resulting double-domain proteins expressed at similar levels as the monomer constructs. In addition, the in-series design retained the molecular resistance to proteolysis during expression and purification. Therefore, by combining intramolecular dimerization driven by Fc interactions with in-series domain expression, it was possible to go from a single SARS-CoV-2 antigen fragment per molecule to having 4 (and potentially more) per molecule. The higher antigen content in conjunction with robust expression levels and protein stability provides a suitable framework for an immunogen to be used for vaccine and boost applications.

[0114] As an example of this approach, double-domain Fc-fusion constructs (i.e., recombinant polypeptides containing two immunogenic fragments connected to an antibody Fc region) containing amino acid mutations within one or both of the domains were prepared. The mutations used were either from a single virus variant or a hybrid of two virus variants. Incorporation of the mutations into the double-domain-Fc wild-type molecule (strain 2401) depicted in FIG. 3 followed by expression in CHO cells resulted in intact, soluble protein with similar yields to the wild-type amino acid sequence. These results support the concept that this multi-domain Fc-fusion platform provides a robust scaffold for the incorporation and expression molecules that reflect new variant mutations. This provides a robust, timely and cost-effective system to adapt vaccine composition to meet the needs to mitigate evolving variants. A vaccine containing strain 2401 was subsequently tested in Rhesus macque monkeys.

[0115] Vaccination: Vaccination and boosters to nCOV-2 double dimer (Lytic Solutions Strain #2401, SEQ ID NO: 163, administered to all animals except for those indicated to be administered the nCOV-2 quadruple mutant vaccine) or nCOV-2 quadruple mutant vaccine (Lytic Solutions Strain #2435, SEQ ID NO: 169, referred to in Table 2C as “Variant COVID Vaccine” in Adjuvant & Dose column) were performed on Rhesus macaque monkeys by the following methodology. 50, 25, or 12.5 micrograms (these numbers are used to define dosage) of nCOV-2 protein was mixed with either AS03 (Invivogen catalog vac-as03-10) or alum (Invivogen catalog vac-alu-250) as a 1:1 volume mixture protein: adjuvant. For 50 ug doses 500 ul of each protein and adjuvant were used, for 25 ug and 12.5 ug 250 ul of each protein and adjuvant were used. Dosages were split and injected intramuscularly into left and right thighs at the time of initial vaccination and at booster vaccination. Initial vaccination day was designated day 0. Boosters were given 28 day post day 0 unless otherwise noted. Serum samples were taken prior to initial vaccination on day 0, day 14, day 28 prior to booster vaccination, and day 42 and day 56 were 2/4 weeks post booster injection. Therefore data from 14 and 28 (immunization plus 2 weeks and immunization plus 4 weeks, respectively) days are specific to a single dose of vaccine whereas samples from day 42 and day 56 are 2 doses of vaccine (booster plus 2 weeks, and booster plus 4 weeks respectively). Each animal received the same dosage of protein and adjuvant for the booster dose that they received in the primary dose.

[0116] Analysis of antibody titers were performed at Intuitive Biosciences, Madison WI on their proprietary ELISA system (918 Deming Way, Suite 100, Madison WI 53719 USA). Serum was serially diluted in CSA buffer (Intuitive product no. 7-1037) to dilutions of 1:100, 1:1000, 1:10,000, 1:100,000, and 1:1,000,000. Analysis was performed at and by Intuitive Biosciences. ELISA units are measured as density on their platform with a maximum signal of approximately 45,000-50,000 counts. Titer signals were determined from dilutions that yielded signals less than ⅓rd maximal signal. Fifteen animals were used to determine vaccine/booster efficacy. Animal names are codes generated for each animal at the primate facility at UW-Madison. All animals were assayed through day 56 post initial vaccination. 50, 25, and 12.5 ug doses gave similar titers for day 28. Some animals were followed past the study design point of 56 days to various time points up to 23 weeks post initial vaccine (due to continued potency of vaccine response). Data is summarized in Tables 2A, 2B, and 2C. It is noted that, although some of the Plate Sample ID numbers are overlapping, e.g., Tables 2A and 2B both have a row with a plate sample ID of 59, this is merely an artifact of the data collection process, such that rows with the same Plate Sample ID represent independently collected data points.

[0117] 50 ug, 25 ug, 12.5 ug: These data show that relatively low dosages of the tested constructs, including 12.5 ug, still elicited sufficient immune stimulation and/or boosting. Such low amounts of protein per vaccine dose allow for an increased number of active doses to be produced per liter of cell culture. As production levels increase, not only do cost of goods go down, but the timeframe to produce large numbers of doses can be decreased in comparison to vaccine compositions requiring higher amounts of protein per dose to provide sufficient immune protection. This is particularly relevant to providing immune protection against any newly-arising SARS-COV-2 strains.

[0118] The assembly of four point-mutations into a single RBD polypeptide was undertaken prior to public disclosure of the Delta mutant isolated first in India. Vaccine LS2435 (SEQ ID NO: 169) contains mutations in four sites that reflect mutation that evolved from new variants identified from the UK, South Africa, Brazil and southern California. Convergent evolution of mutations in new variants lead this to be an attractive approach of stacking multiple mutations in one construct to represent multiple variants, such as seen in the Delta variant. Each RBD point mutation was determined to add virulency through either immune system avoidance or enhanced viral entry or production of higher viral loads (or a combination thereof). The identified mutations were combined to develop a vaccine that could address each mutation and immune epitope singly or in combination. When evolutionary boundaries are considered, it became clear that mutational stacking was likely to take place through either recombination of previous viral strains, or additional mutations stacked onto previous viral strains that enhanced virulence/transmission. Considering the mutation-stacked SARS COV-2 strains can evade the immune response as well as generate a more potent viral titer, having a vaccine that displays high levels of antibody and T-cell potency is a major advantage over previous COVID-19 vaccines which can provide less potent immune responses to these mutants. The SARS COV-2 mutant-containing vaccine LS2435 demonstrates highly potent immune stimulation and antibody production in Rhesus macaques. In fact, the levels of antibodies achieved with the mutant vaccine are similar to responses seen from the tested wild-type vaccine, i.e., LS2401.

TABLE 2A

| | | | | | Animal - | |
|---|---|---|---|---|---|---|
| Plate | | | | | Adjuvant & | Days post |
| Sample ID | Spike S1 | Spike S2 | Nucleocapsid | Dilution | Dosage | injection |
| 59 | 14 | 217 | 296 | 1:100 | BH56 - | 0 |
| | | | | | AS03 50 ug | |
| 60 | 19 | 21 | 418 | 1:1,000 | BH56 - | 0 |
| | | | | | AS03 50 ug | |
| 61 | 0 | 30 | 100 | 1:10,000 | BH56 - | 0 |
| | | | | | AS03 50 ug | |
| 62 | 44982 | 343 | 489 | 1:100 | BH56 - | 14 |
| | | | | | AS03 50 ug | |
| 63 | 31862 | 49 | 445 | 1:1,000 | BH56 - | 14 |
| | | | | | AS03 50 ug | |
| 64 | 3227 | 28 | 276 | 1:10,000 | BH56 - | 14 |
| | | | | | AS03 50 ug | |
| 65 | 47053 | 507 | 642 | 1:100 | BH56 - | 28 |
| | | | | | AS03 50 ug | |
| 66 | 35647 | 42 | 46 | 1:1,000 | BH56 - | 28 |
| | | | | | AS03 50 ug | |
| 67 | 9818 | 57 | 290 | 1:10,000 | BH56 - | 28 |
| | | | | | AS03 50 ug | |
| 68 | 34 | 116 | 508 | 1:100 | BC43 - | 0 |
| | | | | | Alum 50 ug | |
| 69 | 0 | 30 | 291 | 1:1,000 | BC43 - | 0 |
| | | | | | Alum 50 ug | |
| 70 | 22 | 52 | 1 | 1:10,000 | BC43 - | 0 |
| | | | | | Alum 50 ug | |
| 71 | 36334 | 67 | 208 | 1:100 | BC43 - | 14 |
| | | | | | Alum 50 ug | |
| 72 | 14375 | 720 | 553 | 1:1,000 | BC43 - | 14 |
| | | | | | Alum 50 ug | |
| 73 | 234 | 0 | 0 | 1:10,000 | BC43 - | 14 |
| | | | | | Alum 50 ug | |
| 74 | 46731 | 20 | 36 | 1:100 | BC43 - | 28 |
| | | | | | Alum 50 ug | |
| 75 | 39535 | 56 | 258 | 1:1,000 | BC43 - | 28 |
| | | | | | Alum 50 ug | |
| 76 | 5458 | 17 | 1 | 1:10,000 | BC43 - | 28 |
| | | | | | Alum 50 ug | |
| 77 | 0 | 97 | 318 | 1:100 | BH95 - | 0 |
| | | | | | Alum 50 ug | |
| 78 | 0 | 66 | 146 | 1:1,000 | BH95 - | 0 |
| | | | | | Alum 50 ug | |
| 79 | 1 | 12 | 23 | 1:10,000 | BH95 - | 0 |
| | | | | | Alum 50 ug | |
| 80 | 42119 | 63 | 259 | 1:100 | BH95 - | 14 |
| | | | | | Alum 50 ug | |
| 81 | 30356 | 59 | 644 | 1:1,000 | BH95 - | 14 |
| | | | | | Alum 50 ug | |
| 82 | 451 | 0 | 0 | 1:10,000 | BH95 - | 14 |
| | | | | | Alum 50 ug | |
| 83 | 49046 | 156 | 63 | 1:100 | BH95 - | 28 |
| | | | | | Alum 50 ug | |
| 84 | 40830 | 0 | 187 | 1:1,000 | BH95 - | 28 |
| | | | | | Alum 50 ug | |
| 85 | 7282 | 28 | 78 | 1:10,000 | BH95 - | 28 |
| | | | | | Alum 50 ug | |
| 86 | 40 | 55 | 557 | 1:100 | BG86 - | 0 |
| | | | | | AS03 50 ug | |
| 87 | 40 | 93 | 766 | 1:1,000 | BG86 - | 0 |
| | | | | | AS03 50 ug | |
| 88 | 0 | 27 | 229 | 1:10,000 | BG86 - | 0 |
| | | | | | AS03 50 ug | |
| 89 | 27694 | 144 | 618 | 1:100 | BG86 - | 14 |
| | | | | | AS03 50 ug | |
| 90 | 436 | 114 | 275 | 1:1,000 | BG86 - | 14 |
| | | | | | AS03 50 ug | |
| 91 | 243 | 23 | 91 | 1:10,000 | BG86 - | 14 |
| | | | | | AS03 50 ug | |
| 92 | 46656 | 85 | 618 | 1:100 | BG86 - | 28 |
| | | | | | AS03 50 ug | |
| 93 | 38813 | 84 | 527 | 1:1,000 | BG86 - | 28 |
| | | | | | AS03 50 ug | |
| 94 | 13019 | 61 | 65 | 1:10,000 | BG86 - | 28 |
| | | | | | AS03 50 ug | |
| Neg Cntl | 46 | 475 | 986 | | | |
| Pos Cntl | 44473 | 39802 | 31871 | | | |

TABLE 2B

| | | | | | Animal - | Time after |
|---|---|---|---|---|---|---|
| Plate | | | | | Adjuvant & | initial |
| Sample ID | Spike S1 | Spike S2 | Nucleocapsid | Dilution | Dosage | vaccination |
| 10 | 47883 | 0 | 96 | 1:10,000 | BC43 - | Day 42 |
| | | | | | Alum 50 ug | |
| 11 | 25917 | 0 | 0 | 1:100,000 | BC43 - | Day 42 |
| | | | | | Alum 50 ug | |
| 12 | 3597 | 14 | 0 | 1:1,000,000 | BC43 - | Day 42 |
| | | | | | Alum 50 ug | |
| 13 | 45232 | 0 | 60 | 1:10,000 | BC43 - | Day 56 |
| | | | | | Alum 50 ug | |
| 14 | 16743 | 0 | 0 | 1:100,000 | BC43 - | Day 56 |
| | | | | | Alum 50 ug | |
| 15 | 2099 | 0 | 0 | 1:1,000,000 | BC43 - | Day 56 |
| | | | | | Alum 50 ug | |
| 16 | 47513 | 156 | 1 | 1:10,000 | BH56 - | Day 42 |
| | | | | | AS03 50 ug | |
| 17 | 24243 | 31 | 21 | 1:100,000 | BH56 - | Day 42 |
| | | | | | AS03 50 ug | |
| 18 | 3976 | 11 | 0 | 1:1,000,000 | BH56 - | Day 42 |
| | | | | | AS03 50 ug | |
| 19 | 45909 | 0 | 31 | 1:10,000 | BH56 - | Day 56 |
| | | | | | AS03 50 ug | |
| 20 | 18140 | 26 | 5 | 1:100,000 | BH56 - | Day 56 |
| | | | | | AS03 50 ug | |
| 21 | 1184 | 2 | 0 | 1:1,000,000 | BH56 - | Day 56 |
| | | | | | AS03 50 ug | |
| 22 | 44095 | 53 | 0 | 1:10,000 | BH95 - | Day 42 |
| | | | | | Alum 50 ug | |
| 23 | 20940 | 26 | 0 | 1:100,000 | BH95 - | Day 42 |
| | | | | | Alum 50 ug | |
| 24 | 1845 | 2 | 28 | 1:1,000,000 | BH95 - | Day 42 |
| | | | | | Alum 50 ug | |
| 25 | 45464 | 67 | 177 | 1:10,000 | BH95 - | Day 56 |
| | | | | | Alum 50 ug | |
| 26 | 17409 | 21 | 5 | 1:100,000 | BH95 - | Day 56 |
| | | | | | Alum 50 ug | |
| 27 | 1281 | 22 | 0 | 1:1,000,000 | BH95 - | Day 56 |
| | | | | | Alum 50 ug | |
| 28 | 48319 | 71 | 0 | 1:10,000 | BC11- | Day 42 |
| | | | | | AS03 50 ug | |
| 29 | 30010 | 10 | 0 | 1:100,000 | BC11- | Day 42 |
| | | | | | AS03 50 ug | |
| 30 | 671 | 14 | 0 | 1:1,000,000 | BC11- | Day 42 |
| | | | | | AS03 50 ug | |
| 31 | 16796 | 4 | 0 | 1:10,000 | BG86 - | Single dose 8 |
| | | | | | AS03 50 ug | weeks |
| 32 | 1550 | 11 | 56 | 1:100,000 | BG86 - | Single dose 8 |
| | | | | | AS03 50 ug | weeks |
| 33 | 164 | 17 | 6 | 1:1,000,000 | BG86 - | Single dose 8 |
| | | | | | AS03 50 ug | weeks |
| 34 | 0 | 64 | 15 | 1:1,000 | BI37 - | Day 0 |
| | | | | | Alum 25 ug | |
| 35 | 2 | 5 | 0 | 1:10,000 | BI37 - | Day 0 |
| | | | | | Alum 25 ug | |
| 36 | 8 | 6 | 25 | 1:100,000 | BI37 - | Day 0 |
| | | | | | Alum 25 ug | |
| 37 | 40318 | 112 | 0 | 1:1,000 | BI37 - | Day 14 |
| | | | | | Alum 25 ug | |
| 38 | 4456 | 35 | 28 | 1:10,000 | BI37 - | Day 14 |
| | | | | | Alum 25 ug | |
| 39 | 655 | 35 | 17 | 1:100,000 | BI37 - | Day 14 |
| | | | | | Alum 25 ug | |
| 40 | 49137 | 127 | 31 | 1:1,000 | BI37 - | Day 28 |
| | | | | | Alum 25 ug | |
| 41 | 32611 | 29 | 2 | 1:10,000 | BI37 - | Day 28 |
| | | | | | Alum 25 ug | |
| 42 | 5526 | 34 | 0 | 1:100,000 | BI37 - | Day 28 |
| | | | | | Alum 25 ug | |
| 43 | 0 | 56 | 15 | 1:1,000 | BK78 - | Day 0 |
| | | | | | AS03 25 ug | |
| 44 | 36 | 46 | 27 | 1:10,000 | BK78 - | Day 0 |
| | | | | | AS03 25 ug | |
| 45 | 45 | 34 | 0 | 1:100,000 | BK78 - | Day 0 |
| | | | | | AS03 25 ug | |
| 46 | 26462 | 49 | 87 | 1:1,000 | BK78 - | Day 14 |
| | | | | | AS03 25 ug | |
| 47 | 965 | 122 | 29 | 1:10,000 | BK78 - | Day 14 |
| | | | | | AS03 25 ug | |
| 48 | 92 | 28 | 37 | 1:100,000 | BK78 - | Day 14 |
| | | | | | AS03 25 ug | |
| 49 | 36563 | 67 | 31 | 1:1,000 | BK78 - | Day 28 |
| | | | | | AS03 25 ug | |
| 50 | 6352 | 34 | 17 | 1:10,000 | BK78 - | Day 28 |
| | | | | | AS03 25 ug | |
| 51 | 917 | 34 | 60 | 1:100,000 | BK78 - | Day 28 |
| | | | | | AS03 25 ug | |
| 52 | 1 | 0 | 160 | 1:1,000 | BM52 - | Day 0 |
| | | | | | AS03 12.5 ug | |
| 53 | 15 | 64 | 60 | 1:10,000 | BM52 - | Day 0 |
| | | | | | AS03 12.5 ug | |
| 54 | 12 | 79 | 49 | 1:100,000 | BM52 - | Day 0 |
| | | | | | AS03 12.5 ug | |
| 55 | 17806 | 684 | 315 | 1:1,000 | BM52 - | Day 14 |
| | | | | | AS03 12.5 ug | |
| 56 | 380 | 147 | 35 | 1:10,000 | BM52 - | Day 14 |
| | | | | | AS03 12.5 ug | |
| 57 | 96 | 32 | 18 | 1:100,000 | BM52 - | Day 14 |
| | | | | | AS03 12.5 ug | |
| 58 | 39459 | 440 | 29 | 1:1,000 | BM52 - | Day 28 |
| | | | | | AS03 12.5 ug | |
| 59 | 4104 | 56 | 12 | 1:10,000 | BM52 - | Day 28 |
| | | | | | AS03 12.5 ug | |
| 60 | 467 | 13 | 26 | 1:100,000 | BM52 - | Day 28 |
| | | | | | AS03 12.5 ug | |
| 61 | 19 | 51 | 0 | 1:1,000 | BC31 - | Day 0 |
| | | | | | Alum 12.5 ug | |
| 62 | 0 | 0 | 2 | 1:10,000 | BC31 - | Day 0 |
| | | | | | Alum 12.5 ug | |
| 63 | 0 | 74 | 30 | 1:100,000 | BC31 - | Day 0 |
| | | | | | Alum 12.5 ug | |
| 64 | 9436 | 123 | 40 | 1:1,000 | BC31 - | Day 14 |
| | | | | | Alum 12.5 ug | |
| 65 | 426 | 27 | 0 | 1:10,000 | BC31 - | Day 14 |
| | | | | | Alum 12.5 ug | |
| 66 | 8 | 31 | 0 | 1:100,000 | BC31 - | Day 14 |
| | | | | | Alum 12.5 ug | |
| 67 | 36234 | 0 | 36 | 1:1,000 | BC31 - | Day 28 |
| | | | | | Alum 12.5 ug | |
| 68 | 7220 | 24 | 14 | 1:10,000 | BC31 - | Day 28 |
| | | | | | Alum 12.5 ug | |
| 69 | 160 | 9 | 8 | 1:100,000 | BC31 - | Day 28 |
| | | | | | Alum 12.5 ug | |
| Neg Cntl | 221 | 1837 | 90 | | | |
| Neg Cntl | 12 | 46 | 10 | | | |
| Pos Cntl | 49197 | 44161 | 45329 | | | |
| Pos Cntl | 47017 | 41224 | 46778 | | | |

TABLE 2C

| | | | | | | Days after | |
|---|---|---|---|---|---|---|---|
| Plate | | | | | | initial | Adjuvant |
| Sample ID | Spike S1 | Spike S2 | Nucleocapsid | Dilution | Animal | injection | & Dose |
| 1A | 15544 | 333 | 104 | 1:10,000 | BG86 | 84 | AS03 50 ug - |
| | | | | | | | single dose |
| 1B | 1751 | 277 | 255 | 1:100,000 | BG86 | 84 | AS03 50 ug - |
| | | | | | | | single dose |
| 1C | 481 | 276 | 123 | 1:1,000,000 | BG86 | 84 | AS03 50 ug - |
| | | | | | | | single dose |
| 2A | 35682 | 375 | 0 | 1:10,000 | BH56 | 84 | AS03 50 ug |
| 2B | 9450 | 313 | 259 | 1:100,000 | BH56 | 84 | AS03 50 ug |
| 2C | 1697 | 329 | 253 | 1:1,000,000 | BH56 | 84 | AS03 50 ug |
| 3A | 39567 | 327 | 368 | 1:10,000 | BC43 | 84 | Alum 50 ug |
| 3B | 9891 | 95 | 124 | 1:100,000 | BC43 | 84 | Alum 50 ug |
| 3C | 1824 | 272 | 0 | 1:1,000,000 | BC43 | 84 | Alum 50 ug |
| 4A | 37479 | 135 | 718 | 1:10,000 | BH95 | 84 | Alum 50 ug |
| 4B | 8790 | 161 | 143 | 1:100,000 | BH95 | 84 | Alum 50 ug |
| 4C | 1619 | 201 | 132 | 1:1,000,000 | BH95 | 84 | Alum 50 ug |
| 6A | 8417 | 127 | 454 | 1:10,000 | BC11 | 14 | AS03 50 ug |
| 6B | 849 | 179 | 71 | 1:100,000 | BC11 | 14 | AS03 50 ug |
| 6C | 265 | 381 | 273 | 1:1,000,000 | BC11 | 14 | AS03 50 ug |
| 7A | 13381 | 607 | 664 | 1:10,000 | BC11 | 28 | AS03 50 ug |
| 7B | 803 | 176 | 81 | 1:100,000 | BC11 | 28 | AS03 50 ug |
| 7C | 341 | 251 | 275 | 1:1,000,000 | BC11 | 28 | AS03 50 ug |
| 8A | 45422 | 341 | 285 | 1:10,000 | BC11 | 56 | AS03 50 ug |
| 8B | 18249 | 173 | 165 | 1:100,000 | BC11 | 56 | AS03 50 ug |
| 8C | 3752 | 213 | 357 | 1:1,000,000 | BC11 | 56 | AS03 50 ug |
| 9A | 42056 | 341 | 292 | 1:10,000 | BC11 | 84 | AS03 50 ug |
| 9B | 14271 | 316 | 163 | 1:100,000 | BC11 | 84 | AS03 50 ug |
| 9C | 2393 | 256 | 129 | 1:1,000,000 | BC11 | 84 | AS03 50 ug |
| 10A | 44288 | 237 | 150 | 1:10,000 | BI37 | 42 | Alum 25 ug |
| 10B | 19432 | 189 | 119 | 1:100,000 | BI37 | 42 | Alum 25 ug |
| 10C | 4354 | 378 | 231 | 1:1,000,000 | BI37 | 42 | Alum 25 ug |
| 11A | 43800 | 239 | 35 | 1:10,000 | BI37 | 56 | Alum 25 ug |
| 11B | 15355 | 138 | 75 | 1:100,000 | BI37 | 56 | Alum 25 ug |
| 11C | 2865 | 337 | 247 | 1:1,000,000 | BI37 | 56 | Alum 25 ug |
| 12A | 38022 | 305 | 18 | 1:10,000 | BI37 | 84 | Alum 25 ug |
| 12B | 11812 | 294 | 86 | 1:100,000 | BI37 | 84 | Alum 25 ug |
| 12C | 1948 | 213 | 243 | 1:1,000,000 | BI37 | 84 | Alum 25 ug |
| 13A | 46998 | 398 | 167 | 1:10,000 | BK78 | 42 | AS03 25 ug |
| 13B | 24787 | 267 | 116 | 1:100,000 | BK78 | 42 | AS03 25 ug |
| 13C | 6808 | 442 | 0 | 1:1,000,000 | BK78 | 42 | AS03 25 ug |
| 14A | 45244 | 441 | 0 | 1:10,000 | BK78 | 56 | AS03 25 ug |
| 14B | 18294 | 209 | 84 | 1:100,000 | BK78 | 56 | AS03 25 ug |
| 14C | 3830 | 484 | 256 | 1:1,000,000 | BK78 | 56 | AS03 25 ug |
| 15A | 41106 | 478 | 0 | 1:10,000 | BK78 | 84 | AS03 25 ug |
| 15B | 14414 | 275 | 83 | 1:100,000 | BK78 | 84 | AS03 25 ug |
| 15C | 3328 | 435 | 269 | 1:1,000,000 | BK78 | 84 | AS03 25 ug |
| 16A | 46111 | 524 | 779 | 1:10,000 | BM52 | 42 | AS03 12.5 ug |
| 16B | 24586 | 113 | 300 | 1:100,000 | BM52 | 42 | AS03 12.5 ug |
| 16C | 7160 | 223 | 156 | 1:1,000,000 | BM52 | 42 | AS03 12.5 ug |
| 17A | 41733 | 328 | 527 | 1:10,000 | BM52 | 56 | AS03 12.5 ug |
| 17B | 18140 | 284 | 157 | 1:100,000 | BM52 | 56 | AS03 12.5 ug |
| 17C | 3499 | 222 | 380 | 1:1,000,000 | BM52 | 56 | AS03 12.5 ug |
| 18A | 36263 | 995 | 242 | 1:10,000 | BM52 | 84 | AS03 12.5 ug |
| 18B | 11912 | 525 | 277 | 1:100,000 | BM52 | 84 | AS03 12.5 ug |
| 18C | 1679 | 190 | 301 | 1:1,000,000 | BM52 | 84 | AS03 12.5 ug |
| 19A | 43970 | 345 | 37 | 1:10,000 | BC31 | 42 | Alum 12.5 ug |
| 19B | 20155 | 255 | 25 | 1:100,000 | BC31 | 42 | Alum 12.5 ug |
| 19C | 3849 | 321 | 268 | 1:1,000,000 | BC31 | 42 | Alum 12.5 ug |
| 20A | 40779 | 264 | 0 | 1:10,000 | BC31 | 56 | Alum 12.5 ug |
| 20B | 18417 | 298 | 196 | 1:100,000 | BC31 | 56 | Alum 12.5 ug |
| 20C | 2169 | 261 | 24 | 1:1,000,000 | BC31 | 56 | Alum 12.5 ug |
| 21A | 32251 | 89 | 0 | 1:10,000 | BC31 | 84 | Alum 12.5 ug |
| 21B | 9977 | 314 | 197 | 1:100,000 | BC31 | 84 | Alum 12.5 ug |
| 21C | 1521 | 384 | 213 | 1:1,000,000 | BC31 | 84 | Alum 12.5 ug |
| 22A | 43 | 249 | 129 | 1:10,000 | BM21 | 0 | AS03 12.5 ug |
| 22B | 267 | 215 | 186 | 1:100,000 | BM21 | 0 | AS03 12.5 ug |
| 22C | 225 | 270 | 141 | 1:1,000,000 | BM21 | 0 | AS03 12.5 ug |
| 23A | 2694 | 331 | 96 | 1:10,000 | BM21 | 14 | AS03 12.5 ug |
| 23B | 621 | 202 | 190 | 1:100,000 | BM21 | 14 | AS03 12.5 ug |
| 23C | 297 | 339 | 225 | 1:1,000,000 | BM21 | 14 | AS03 12.5 ug |
| 24A | 5672 | 361 | 75 | 1:10,000 | BM21 | 28 | AS03 12.5 ug |
| 24B | 905 | 39 | 168 | 1:100,000 | BM21 | 28 | AS03 12.5 ug |
| 24C | 91 | 129 | 139 | 1:1,000,000 | BM21 | 28 | AS03 12.5 ug |
| 25A | 45613 | 555 | 118 | 1:10,000 | BM21 | 49 | AS03 12.5 ug |
| 25B | 23568 | 513 | 244 | 1:100,000 | BM21 | 49 | AS03 12.5 ug |
| 25C | 4134 | 293 | 248 | 1:1,000,000 | BM21 | 49 | AS03 12.5 ug |
| 26A | 39959 | 429 | 19 | 1:10,000 | BM21 | 63 | AS03 12.5 ug |
| 26B | 15663 | 309 | 161 | 1:100,000 | BM21 | 63 | AS03 12.5 ug |
| 26C | 2263 | 240 | 273 | 1:1,000,000 | BM21 | 63 | AS03 12.5 ug |
| 27A | 34745 | 371 | 47 | 1:10,000 | BM21 | 91 | AS03 12.5 ug |
| 27B | 9926 | 402 | 121 | 1:100,000 | BM21 | 91 | AS03 12.5 ug |
| 27C | 1197 | 299 | 380 | 1:1,000,000 | BM21 | 91 | AS03 12.5 ug |
| 28A | 879 | 302 | 80 | 1:10,000 | BD82 | 0 | Alum 12.5 ug |
| 28B | 538 | 470 | 120 | 1:100,000 | BD82 | 0 | Alum 12.5 ug |
| 28C | 591 | 135 | 129 | 1:1,000,000 | BD82 | 0 | Alum 12.5 ug |
| 29A | 3764 | 90 | 0 | 1:10,000 | BD82 | 14 | Alum 12.5 ug |
| 29B | 532 | 397 | 227 | 1:100,000 | BD82 | 14 | Alum 12.5 ug |
| 29C | 307 | 583 | 267 | 1:1,000,000 | BD82 | 14 | Alum 12.5 ug |
| 30A | 9816 | 337 | 84 | 1:10,000 | BD82 | 21 | Alum 12.5 ug |
| 30B | 2407 | 371 | 169 | 1:100,000 | BD82 | 21 | Alum 12.5 ug |
| 30C | 285 | 462 | 245 | 1:1,000,000 | BD82 | 21 | Alum 12.5 ug |
| 31A | 41086 | 344 | 128 | 1:10,000 | BD82 | 35 | Alum 12.5 ug |
| 31B | 19882 | 159 | 219 | 1:100,000 | BD82 | 35 | Alum 12.5 ug |
| 31C | 2912 | 333 | 73 | 1:1,000,000 | BD82 | 35 | Alum 12.5 ug |
| 32A | 36345 | 245 | 57 | 1:10,000 | BD82 | 49 | Alum 12.5 ug |
| 32B | 13460 | 469 | 264 | 1:100,000 | BD82 | 49 | Alum 12.5 ug |
| 32C | 2585 | 149 | 9 | 1:1,000,000 | BD82 | 49 | Alum 12.5 ug |
| 33A | 27977 | 400 | 185 | 1:10,000 | BD82 | 77 | Alum 12.5 ug |
| 33B | 7948 | 288 | 80 | 1:100,000 | BD82 | 77 | Alum 12.5 ug |
| 33C | 904 | 262 | 28 | 1:1,000,000 | BD82 | 77 | Alum 12.5 ug |
| 34A | 62 | 274 | 150 | 1:10,000 | BE83 | 0 | Alum 25 ug |
| 34B | 385 | 232 | 217 | 1:100,000 | BE83 | 0 | Alum 25 ug |
| 34C | 142 | 306 | 292 | 1:1,000,000 | BE83 | 0 | Alum 25 ug |
| 35A | 3232 | 69 | 94 | 1:10,000 | BE83 | 14 | Alum 25 ug |
| 35B | 804 | 343 | 34 | 1:100,000 | BE83 | 14 | Alum 25 ug |
| 35C | 129 | 222 | 161 | 1:1,000,000 | BE83 | 14 | Alum 25 ug |
| 36A | 8300 | 150 | 58 | 1:10,000 | BE83 | 21 | Alum 25 ug |
| 36B | 1700 | 295 | 153 | 1:100,000 | BE83 | 21 | Alum 25 ug |
| 36C | 266 | 285 | 111 | 1:1,000,000 | BE83 | 21 | Alum 25 ug |
| 37A | 38645 | 368 | 0 | 1:10,000 | BE83 | 35 | Alum 25 ug |
| 37B | 13433 | 320 | 151 | 1:100,000 | BE83 | 35 | Alum 25 ug |
| 37C | 3155 | 306 | 112 | 1:1,000,000 | BE83 | 35 | Alum 25 ug |
| 38A | 35954 | 375 | 67 | 1:10,000 | BE83 | 49 | Alum 25 ug |
| 38B | 14846 | 190 | 89 | 1:100,000 | BE83 | 49 | Alum 25 ug |
| 38C | 3553 | 339 | 246 | 1:1,000,000 | BE83 | 49 | Alum 25 ug |
| 39A | 23360 | 373 | 0 | 1:10,000 | BE83 | 77 | Alum 25 ug |
| 39B | 7836 | 72 | 31 | 1:100,000 | BE83 | 77 | Alum 25 ug |
| 40A | 12128 | 194 | 190 | 1:10,000 | BG86 | 105 | AS03 50 ug - |
| | | | | | | | single dose |
| 40B | 2292 | 161 | 159 | 1:100,000 | BG86 | 105 | AS03 50 ug - |
| | | | | | | | single dose |
| 40C | 261 | 187 | 191 | 1:1,000,000 | BG86 | 105 | AS03 50 ug - |
| | | | | | | | single dose |
| 41A | 10969 | 161 | 0 | 1:10,000 | BG86 | 139 | AS03 50 ug - |
| | | | | | | | single dose |
| 41B | 1875 | 219 | 181 | 1:100,000 | BG86 | 139 | AS03 50 ug - |
| | | | | | | | single dose |
| 41C | 992 | 837 | 705 | 1:1,000,000 | BG86 | 139 | AS03 50 ug- |
| | | | | | | | single dose |
| 42A | 176 | 57 | 120 | 1:10,000 | BG86 | MILK 1 | AS03 50 ug - |
| | | | | | | month post | single dose |
| | | | | | | birth | |
| 42B | 567 | 216 | 123 | 1:100,000 | BG86 | MILK 1 | AS03 50 ug - |
| | | | | | | month post | single dose |
| | | | | | | birth | |
| 42C | 217 | 283 | 153 | 1:1,000,000 | BG86 | MILK 1 | AS03 50 ug - |
| | | | | | | month post | single dose |
| | | | | | | birth | |
| 43A | 9055 | 140 | 149 | 1:10,000 | BP49 | Birth Serum | no vaccine |
| | | | | | Mother is | | |
| | | | | | BG86 | | |
| 43B | 1410 | 121 | 235 | 1:100,000 | BP49 | Birth Serum | no vaccine |
| | | | | | Mother is | | |
| | | | | | BG86 | | |
| 43C | 388 | 311 | 152 | 1:1,000,000 | BP49 | Birth Serum | no vaccine |
| | | | | | Mother is | | |
| | | | | | BG86 | | |
| 44A | 4525 | 35 | 0 | 1:10,000 | BP49 | 4 weeks post | no vaccine |
| | | | | | Mother is | birth serum | |
| | | | | | BG86 | | |
| 44B | 1259 | 269 | 40 | 1:100,000 | BP49 | 4 weeks post | no vaccine |
| | | | | | Mother is | birth serum | |
| | | | | | BG86 | | |
| 44C | 286 | 261 | 223 | 1:1,000,000 | BP49 | 4 weeks post | no vaccine |
| | | | | | Mother is | birth serum | |
| | | | | | BG86 | | |
| 45A | 23973 | 304 | 97 | 1:10,000 | BC43 | 162 | Alum 50 ug |
| 45B | 4896 | 272 | 161 | 1:100,000 | BC43 | 162 | Alum 50 ug |
| 45C | 649 | 212 | 208 | 1:1,000,000 | BC43 | 162 | Alum 50 ug |
| 46A | 32326 | 192 | 36 | 1:10,000 | BK78 | 142 | AS03 25 ug |
| 46B | 11039 | 336 | 26 | 1:100,000 | BK78 | 142 | AS03 25 ug |
| 46C | 1694 | 418 | 226 | 1:1,000,000 | BK78 | 142 | AS03 25 ug |
| 47A | 21598 | 206 | 0 | 1:10,000 | BM72 | 120 | AS03 25 ug |
| 47B | 5364 | 274 | 237 | 1:100,000 | BM72 | 120 | AS03 25 ug |
| 47C | 496 | 305 | 222 | 1:1,000,000 | BM72 | 120 | AS03 25 ug |
| 48A | 18031 | 166 | 168 | 1:10,000 | BH95 | 162 | Alum 50 ug |
| 48B | 3372 | 304 | 173 | 1:100,000 | BH95 | 162 | Alum 50 ug |
| 48C | 562 | 350 | 191 | 1:1,000,000 | BH95 | 162 | Alum 50 ug |
| 49A | 31501 | 102 | 147 | 1:10,000 | BC11 | 150 | AS03 50 ug |
| 49B | 8850 | 327 | 191 | 1:100,000 | BC11 | 150 | AS03 50 ug |
| 49C | 1716 | 447 | 257 | 1:1,000,000 | BC11 | 150 | AS03 50 ug |
| 50A | 38099 | 414 | 277 | 1:10,000 | BM52 | 142 | AS03 12.5 ug |
| 50B | 16407 | 288 | 305 | 1:100,000 | BM52 | 142 | AS03 12.5 ug |
| 50C | 3171 | 304 | 136 | 1:1,000,000 | BM52 | 142 | AS03 12.5 ug |
| 51A | 358 | 131 | 191 | 1:10,000 | BJ55 | 0 | None - |
| | | | | | | | Control |
| 51B | 443 | 363 | 357 | 1:100,000 | BJ55 | 0 | None - |
| | | | | | | | Control |
| 51C | 138 | 371 | 117 | 1:1,000,000 | BJ55 | 0 | None - |
| | | | | | | | Control |
| 52A | 19609 | 216 | 139 | 1:10,000 | BI37 | 150 | Alum 25 ug |
| 52B | 4058 | 261 | 214 | 1:100,000 | BI37 | 150 | Alum 25 ug |
| 52C | 465 | 148 | 32 | 1:1,000,000 | BI37 | 150 | Alum 25 ug |
| 53A | 31360 | 392 | 175 | 1:10,000 | BH56 | 169 | AS03 50 ug |
| 53B | 8082 | 202 | 146 | 1:100,000 | BH56 | 169 | AS03 50 ug |
| 53C | 1013 | 342 | 97 | 1:1,000,000 | BH56 | 169 | AS03 50 ug |
| 54A | 20996 | 282 | 110 | 1:10,000 | BE83 | 118 | Alum 25 ug |
| 54B | 4122 | 195 | 75 | 1:100,000 | BE83 | 118 | Alum 25 ug |
| 54C | 534 | 319 | 226 | 1:1,000,000 | BE83 | 118 | Alum 25 ug |
| 55A | 433 | 353 | 151 | 1:10,000 | BI98 | 0 | None - |
| | | | | | | | Control |
| 55B | 290 | 186 | 114 | 1:100,000 | BI98 | 0 | None - |
| | | | | | | | Control |
| 55C | 129 | 297 | 190 | 1:1,000,000 | BI98 | 0 | None - |
| | | | | | | | Control |
| 56A | 21633 | 245 | 129 | 1:10,000 | BI21 | 56 | Variant |
| | | | | | | | COVID |
| | | | | | | | Vaccine |
| | | | | | | | AS03 25 ug |
| 56B | 5705 | 570 | 216 | 1:100,000 | BI21 | 56 | Variant |
| | | | | | | | COVID |
| | | | | | | | Vaccine |
| | | | | | | | AS03 25 ug |
| 56C | 840 | 228 | 155 | 1:1,000,000 | BI21 | 56 | Variant |
| | | | | | | | COVID |
| | | | | | | | Vaccine |
| | | | | | | | AS03 25 ug |
| 57A | 10191 | 173 | 239 | 1:10,000 | BC31 | 148 | Alum 12.5 ug |
| 57B | 1927 | 340 | 170 | 1:100,000 | BC31 | 148 | Alum 12.5 ug |
| 57C | 217 | 480 | 353 | 1:1,000,000 | BC31 | 148 | Alum 12.5 ug |
| 58A | 25739 | 262 | 179 | 1:10,000 | BK44 | 56 | Variant |
| | | | | | | | COVID |
| | | | | | | | Vaccine |
| | | | | | | | AS03 25 ug |
| 58B | 4927 | 278 | 91 | 1:100,000 | BK44 | 56 | Variant |
| | | | | | | | COVID |
| | | | | | | | Vaccine |
| | | | | | | | AS03 25 ug |
| 58C | 1183 | 183 | 113 | 1:1,000,000 | BK44 | 56 | Variant |
| | | | | | | | COVID |
| | | | | | | | Vaccine |
| | | | | | | | AS03 25 ug |
| 59A | 20341 | 177 | 4 | 1:10,000 | BD82 | 118 | Alum 12.5 ug |
| 59B | 3719 | 264 | 238 | 1:100,000 | BD82 | 118 | Alum 12.5 ug |
| 59C | 410 | 377 | 318 | 1:1,000,000 | BD82 | 118 | Alum 12.5 ug |
| 60A | 38868 | 621 | 413 | 1:10,000 | BM52 | 148 | AS03 12.5 ug |
| 60B | 14327 | 303 | 250 | 1:100,000 | BM52 | 148 | AS03 12.5 ug |
| 60C | 1649 | 214 | 132 | 1:1,000,000 | BM52 | 148 | AS03 12.5 ug |
| 61A | 26273 | 155 | 0 | 1:10,000 | BM21 | 125 | AS03 12.5 ug |
| 61B | 5330 | 236 | 108 | 1:100,000 | BM21 | 125 | AS03 12.5 ug |
| 61C | 861 | 340 | 169 | 1:1,000,000 | BM21 | 125 | AS03 12.5 ug |
| 62A | 19650 | 161 | 0 | 1:10,000 | BI21 | 84 | Variant |
| | | | | | | | COVID |
| | | | | | | | Vaccine |
| | | | | | | | AS03 25 ug |
| 62B | 5896 | 307 | 69 | 1:100,000 | BI21 | 84 | Variant |
| | | | | | | | COVID |
| | | | | | | | Vaccine |
| | | | | | | | AS03 25 ug |
| 62C | 747 | 244 | 229 | 1:1,000,000 | BI21 | 84 | Variant |
| | | | | | | | COVID |
| | | | | | | | Vaccine |
| | | | | | | | AS03 25 ug |
| 63A | 20018 | 179 | 39 | 1:10,000 | BK44 | 84 | Variant |
| | | | | | | | COVID |
| | | | | | | | Vaccine |
| | | | | | | | AS03 25 ug |
| 63B | 3860 | 184 | 53 | 1:100,000 | BK44 | 84 | A Variant |
| | | | | | | | COVID |
| | | | | | | | Vaccine |
| | | | | | | | S03 25 ug |
| 63C | 614 | 201 | 54 | 1:1,000,000 | BK44 | 84 | Variant |
| | | | | | | | COVID |
| | | | | | | | Vaccine |
| | | | | | | | AS03 25 ug |
| 66A | 0 | 56 | 131 | 1:10,000 | BK44 | 0 | Variant |
| | | | | | | | COVID |
| | | | | | | | Vaccine |
| | | | | | | | AS03 25 ug |
| 66B | 144 | 450 | 345 | 1:100,000 | BK44 | 0 | Variant |
| | | | | | | | COVID |
| | | | | | | | Vaccine |
| | | | | | | | AS03 25 ug |
| 66C | 224 | 411 | 146 | 1:1,000,000 | BK44 | 0 | Variant |
| | | | | | | | COVID |
| | | | | | | | Vaccine |
| | | | | | | | AS03 25 ug |
| 67A | 1739 | 73 | 60 | 1:10,000 | BK44 | 28 | Variant |
| | | | | | | | COVID |
| | | | | | | | Vaccine |
| | | | | | | | AS03 25 ug |
| 67B | 415 | 306 | 202 | 1:100,000 | BK44 | 28 | Variant |
| | | | | | | | COVID |
| | | | | | | | Vaccine |
| | | | | | | | AS03 25 ug |
| 67C | 19 | 229 | 161 | 1:1,000,000 | BK44 | 28 | Variant |
| | | | | | | | COVID |
| | | | | | | | Vaccine |
| | | | | | | | AS03 25 ug |
| 68A | 25898 | 257 | 0 | 1:10,000 | BK44 | 56 | Variant |
| | | | | | | | COVID |
| | | | | | | | Vaccine |
| | | | | | | | AS03 25 ug |
| 68B | 7243 | 332 | 446 | 1:100,000 | BK44 | 56 | Variant |
| | | | | | | | COVID |
| | | | | | | | Vaccine |
| | | | | | | | AS03 25 ug |
| 68C | 1135 | 174 | 92 | 1:1,000,000 | BK44 | 56 | Variant |
| | | | | | | | COVID |
| | | | | | | | Vaccine |
| | | | | | | | AS03 25 ug |
| 69A | 11 | 215 | 103 | 1:10,000 | BI21 | 0 | Variant |
| | | | | | | | COVID |
| | | | | | | | Vaccine |
| | | | | | | | AS03 25 ug |
| 69B | 95 | 0 | 50 | 1:100,000 | BI21 | 0 | Variant |
| | | | | | | | COVID |
| | | | | | | | Vaccine |
| | | | | | | | AS03 25 ug |
| 69C | 152 | 165 | 102 | 1:1,000,000 | BI21 | 0 | Variant |
| | | | | | | | COVID |
| | | | | | | | Vaccine |
| | | | | | | | AS03 25 ug |
| 70A | 2679 | 232 | 120 | 1:10,000 | BI21 | 28 | Variant |
| | | | | | | | COVID |
| | | | | | | | Vaccine |
| | | | | | | | AS03 25 ug |
| 70B | 429 | 335 | 2 | 1:100,000 | BI21 | 28 | Variant |
| | | | | | | | COVID |
| | | | | | | | Vaccine |
| | | | | | | | AS03 25 ug |
| 70C | 327 | 1562 | 839 | 1:1,000,000 | BI21 | 28 | Variant |
| | | | | | | | COVID |
| | | | | | | | Vaccine |
| | | | | | | | AS03 25 ug |
| 71A | 22367 | 177 | 31 | 1:10,000 | BI21 | 56 | Variant |
| | | | | | | | COVID |
| | | | | | | | Vaccine |
| | | | | | | | AS03 25 ug |
| 71B | 5939 | 281 | 116 | 1:100,000 | BI21 | 56 | Variant |
| | | | | | | | COVID |
| | | | | | | | Vaccine |
| | | | | | | | AS03 25 ug |
| 71C | 841 | 299 | 142 | 1:1,000,000 | BI21 | 56 | Variant |
| | | | | | | | COVID |
| | | | | | | | Vaccine |
| | | | | | | | AS03 25 ug |
| 72A | 85 | 292 | 16 | 1:10,000 | BM72 | 0 | AS03 25 ug |
| 72B | 331 | 449 | 281 | 1:100,000 | BM72 | 0 | AS03 25 ug |
| 72C | 294 | 312 | 139 | 1:1,000,000 | BM72 | 0 | AS03 25 ug |
| 73A | 4015 | 229 | 162 | 1:10,000 | BM72 | 28 | AS03 25 ug |
| 73B | 764 | 251 | 262 | 1:100,000 | BM72 | 28 | AS03 25 ug |
| 73C | 476 | 499 | 165 | 1:1,000,000 | BM72 | 28 | AS03 25 ug |
| 74A | 35753 | 239 | 39 | 1:10,000 | BM72 | 56 | AS03 25 ug |
| 74B | 13297 | 277 | 123 | 1:100,000 | BM72 | 56 | AS03 25 ug |
| 74C | 2518 | 396 | 126 | 1:1,000,000 | BM72 | 56 | AS03 25 ug |

[0119] Example 3: Expression construct CDS inserts were made by DNA synthesis and cloned into a C-terminal linker-Fc (human IgG1 Fc) expression vector. Transfection grade plasmid was prepared and used for transient transfection of ExpiCHO or CHO-S cells using the Mirus Bio CHOgro medium and transfection system. Transfection cultures were on the 25 mL scale. After 7-days of post-transfection culturing, protein was affinity purified from the cell medium using Protein A chromatography, washed extensively with PBS (pH 7.2), and eluted with low-pH sodium acetate elution followed by rapid neutralization with TRIS/HCl buffer, pH7.2. Eluted protein was analyzed by spectrophotometric absorbance of 280 nm light. Particularly, the constructs analyzed were CTD-short_g (Wuhan) (SEQ ID NO: 35), and CTD-short_i (Wuhan) (SEQ ID NO: 39), both of which were grown in CHO-S cells. CTD-short_i (BA.4/5) (SEQ ID NO: 713); CTD-short_i (BQ.1.1) (SEQ ID NO: 705); CTD-short_i (BA.2.75) (SEQ ID NO: 714); CTD-short_i (BA.2.75.2) (SEQ ID NO: 715); CTD-short_i (BA.4.6) (SEQ ID NO: 716); and CTD-short_i (XBB) (SEQ ID NO: 709), were all grown in ExpiCHO cells.

TABLE 3
Selected Sequences

| SEQ | | |
|---|---|---|
| ID | | |
| NO: | Description | Sequence |
| 705 | BQ.1.1 | NITNLCPFDEVFNATTFASVYAWNRKRISNCVADYSVLYNFAPFFAFKC |
| | fragment 1 | YGVSPTKLNDLCFTNVYADSFVIRGNEVSQIAPGQTGNIADYNYKLPDD |
| | (AA) | FTGCVIAWNSNKLDSTVGGNYNYRYRLFRKSKLKPFERDISTEIYQAGN |
| | | KPCNGVAGVNCYFPLQSYGFRPTYGVGHQPYRVVVLSFELLHAPATVC |
| | | GPKKSTNLVKNK |
| 706 | BQ.1.1 | NITNLCPFDEVFNATTFASVYAWNRKRISNCVADYSVLYNFAPFFAFKC |
| | fragment 2 | YGVSPTKLNDLCFTNVYADSFVIRGNEVSQIAPGQTGNIADYNYKLPDD |
| | (AA) | FTGCVIAWNSNKLDSTVGGNYNYRYRLFRKSKLKPFERDISTEIYQAGN |
| | | KPCNGVAGVNCYFPLQSYGFRPTYGVGHQPYRVVVLSFELLHAPATVC |
| | | GPKKSTNLV |
| 707 | BQ.1.1 | ITNLCPFDEVFNATTFASVYAWNRKRISNCVADYSVLYNFAPFFAFKCY |
| | fragment 3 | GVSPTKLNDLCFTNVYADSFVIRGNEVSQIAPGQTGNIADYNYKLPDDF |
| | (AA) | TGCVIAWNSNKLDSTVGGNYNYRYRLFRKSKLKPFERDISTEIYQAGNK |
| | | PCNGVAGVNCYFPLQSYGFRPTYGVGHQPYRVVVLSFELLHAPATVCG |
| | | PKKSTNLVKNK |
| 708 | BQ.1.1 | NITNLCPFDEVFNATTFASVYAWNRKRISNCVADYSVLYNFAPFFAFKC |
| | fragment 4 | YGVSPTKLNDLCFTNVYADSFVIRGNEVSQIAPGQTGNIADYNYKLPDD |
| | (AA) | FTGCVIAWNSNKLDSTVGGNYNYRYRLFRKSKLKPFERDISTEIYQAGN |
| | | KPCNGVAGVNCYFPLQSYGFRPTYGVGHQPYRVVVLSFELLHAPATVC |
| | | GPKKSTNLV |
| 709 | XBB | NITNLCPFHEVFNATTFASVYAWNRKRISNCVADYSVLYNFAPFFAFKC |
| | fragment 1 | YGVSPTKLNDLCFTNVYADSFVIRGNEVSQIAPGQTGNIADYNYKLPDD |
| | (AA) | FTGCVIAWNSNKLDSKPSGNYNYRYRLFRKSKLKPFERDISTEIYQAGN |
| | | KPCNGVAGSNCYSPLQSYGFRPTYGVGHQPYRVVVLSFELLHAPATVC |
| | | GPKKSTNLVKNK |
| 710 | XBB | NITNLCPFHEVFNATTFASVYAWNRKRISNCVADYSVLYNFAPFFAFKC |
| | fragment 2 | YGVSPTKLNDLCFTNVYADSFVIRGNEVSQIAPGQTGNIADYNYKLPDD |
| | (AA) | FTGCVIAWNSNKLDSKPSGNYNYRYRLFRKSKLKPFERDISTEIYQAGN |
| | | KPCNGVAGSNCYSPLQSYGFRPTYGVGHQPYRVVVLSFELLHAPATVC |
| | | GPKKSTNLV |
| 711 | XBB | ITNLCPFHEVFNATTFASVYAWNRKRISNCVADYSVLYNFAPFFAFKCY |
| | fragment 3 | GVSPTKLNDLCFTNVYADSFVIRGNEVSQIAPGQTGNIADYNYKLPDDF |
| | (AA) | TGCVIAWNSNKLDSKPSGNYNYRYRLFRKSKLKPFERDISTEIYQAGNK |
| | | PCNGVAGSNCYSPLQSYGFRPTYGVGHQPYRVVVLSFELLHAPATVCG |
| | | PKKSTNLVKNK |
| 712 | XBB | ITNLCPFHEVFNATTFASVYAWNRKRISNCVADYSVLYNFAPFFAFKCY |
| | fragment 4 | GVSPTKLNDLCFTNVYADSFVIRGNEVSQIAPGQTGNIADYNYKLPDDF |
| | (AA) | TGCVIAWNSNKLDSKPSGNYNYRYRLFRKSKLKPFERDISTEIYQAGNK |
| | | PCNGVAGSNCYSPLQSYGFRPTYGVGHQPYRVVVLSFELLHAPATVCG |
| | | PKKSTNLV |
| 713 | BA.4/5 | NITNLCPFDEVFNATRFASVYAWNRKRISNCVADYSVLYNFAPFFAFKC |
| | fragment | YGVSPTKLNDLCFTNVYADSFVIRGNEVSQIAPGQTGNIADYNYKLPDD |
| | (AA) | FTGCVIAWNSNKLDSKVGGNYNYRYRLFRKSNLKPFERDISTEIYQAGN |
| | | KPCNGVAGVNCYFPLQSYGFRPTYGVGHQPYRVVVLSFELLHAPATVC |
| | | GPKKSTNLVKNK |
| 714 | BA.2.75 | NITNLCPFHEVFNATRFASVYAWNRKRISNCVADYSVLYNFAPFFAFKC |
| | fragment | YGVSPTKLNDLCFTNVYADSFVIRGNEVSQIAPGQTGNIADYNYKLPDD |
| | (AA) | FTGCVIAWNSNKLDSKVSGNYNYLYRLFRKSKLKPFERDISTEIYQAGN |
| | | KPCNGVAGFNCYFPLQSYGFRPTYGVGHQPYRVVVLSFELLHAPATVC |
| | | GPKKSTNLVKNK |
| 715 | BA 2.75.2 | NITNLCPFHEVFNATTFASVYAWNRKRISNCVADYSVLYNFAPFFAFKC |
| | fragment | YGVSPTKLNDLCFTNVYADSFVIRGNEVSQIAPGQTGNIADYNYKLPDD |
| | (AA) | FTGCVIAWNSNKLDSKVSGNYNYLYRLFRKSKLKPFERDISTEIYQAGN |
| | | KPCNGVAGSNCYFPLQSYGFRPTYGVGHQPYRVVVLSFELLHAPATVC |
| | | GPKKSTNLVKNK |
| 716 | BA 4.6 | NITNLCPFDEVFNATTFASVYAWNRKRISNCVADYSVLYNFAPFFAFKC |
| | fragment | YGVSPTKLNDLCFTNVYADSFVIRGNEVSQIAPGQTGNIADYNYKLPDD |
| | (AA) | FTGCVIAWNSNKLDSKVGGNYNYRYRLFRKSNLKPFERDISTEIYQAGN |
| | | KPCNGVAGVNCYFPLQSYGFRPTYGVGHQPYRVVVLSFELLHAPATVC |
| | | GPKKSTNLVKNK |
| 717 | BQ.1.1 | AACATAACCAATCTGTGCCCCTTCGACGAGGTATTTAATGCAACTAC |
| | fragment 1 | ATTCGCTAGCGTCTACGCTTGGAATCGGAAACGCATATCTAACTGTG |
| | (Nucl.) | TAGCAGATTATTCCGTACTTTATAACTTCGCTCCCTTTTTCGCTTTCA |
| | | AATGTTACGGAGTGAGCCCTACAAAATTGAACGATCTCTGCTTCACC |
| | | AACGTCTATGCAGACAGTTTTGTTATCCGTGGCAATGAAGTGAGCCA |
| | | GATTGCACCCGGTCAAACTGGGAACATTGCCGACTATAACTACAAA |
| | | CTTCCCGACGACTTCACAGGGTGTGTAATCGCTTGGAACAGCAATAA |
| | | ACTCGACTCTACCGTTGGAGGAAACTACAATTATCGCTACCGCCTTT |
| | | TCCGGAAGTCTAAACTCAAGCCCTTTGAGCGGGACATTAGCACTGA |
| | | GATATATCAGGCAGGTAACAAACCATGCAATGGAGTAGCTGGTGTA |
| | | AACTGCTATTTCCCACTTCAGTCATACGGATTTAGACCCACATACGG |
| | | TGTTGGACACCAACCATATCGTGTGGTTGTGCTCAGTTTTGAACTCC |
| | | TTCATGCCCCTGCCACCGTGTGTGGGCCTAAAAAGTCCACCAACTTG |
| | | GTCAAGAATAAA |
| 718 | BQ.1.1 | AACATAACCAATCTGTGCCCCTTCGACGAGGTATTTAATGCAACTAC |
| | fragment 2 | ATTCGCTAGCGTCTACGCTTGGAATCGGAAACGCATATCTAACTGTG |
| | (Nucl.) | TAGCAGATTATTCCGTACTTTATAACTTCGCTCCCTTTTTCGCTTTCA |
| | | AATGTTACGGAGTGAGCCCTACAAAATTGAACGATCTCTGCTTCACC |
| | | AACGTCTATGCAGACAGTTTTGTTATCCGTGGCAATGAAGTGAGCCA |
| | | GATTGCACCCGGTCAAACTGGGAACATTGCCGACTATAACTACAAA |
| | | CTTCCCGACGACTTCACAGGGTGTGTAATCGCTTGGAACAGCAATAA |
| | | ACTCGACTCTACCGTTGGAGGAAACTACAATTATCGCTACCGCCTTT |
| | | TCCGGAAGTCTAAACTCAAGCCCTTTGAGCGGGACATTAGCACTGA |
| | | GATATATCAGGCAGGTAACAAACCATGCAATGGAGTAGCTGGTGTA |
| | | AACTGCTATTTCCCACTTCAGTCATACGGATTTAGACCCACATACGG |
| | | TGTTGGACACCAACCATATCGTGTGGTTGTGCTCAGTTTTGAACTCC |
| | | TTCATGCCCCTGCCACCGTGTGTGGGCCTAAAAAGTCCACCAACTTG |
| | | GTC |
| 719 | BQ.1.1 | ATAACCAATCTGTGCCCCTTCGACGAGGTATTTAATGCAACTACATT |
| | fragment 3 | CGCTAGCGTCTACGCTTGGAATCGGAAACGCATATCTAACTGTGTAG |
| | (Nucl.) | CAGATTATTCCGTACTTTATAACTTCGCTCCCTTTTTCGCTTTCAAAT |
| | | GTTACGGAGTGAGCCCTACAAAATTGAACGATCTCTGCTTCACCAAC |
| | | GTCTATGCAGACAGTTTTGTTATCCGTGGCAATGAAGTGAGCCAGAT |
| | | TGCACCCGGTCAAACTGGGAACATTGCCGACTATAACTACAAACTTC |
| | | CCGACGACTTCACAGGGTGTGTAATCGCTTGGAACAGCAATAAACT |
| | | CGACTCTACCGTTGGAGGAAACTACAATTATCGCTACCGCCTTTTCC |
| | | GGAAGTCTAAACTCAAGCCCTTTGAGCGGGACATTAGCACTGAGAT |
| | | ATATCAGGCAGGTAACAAACCATGCAATGGAGTAGCTGGTGTAAAC |
| | | TGCTATTTCCCACTTCAGTCATACGGATTTAGACCCACATACGGTGT |
| | | TGGACACCAACCATATCGTGTGGTTGTGCTCAGTTTTGAACTCCTTC |
| | | ATGCCCCTGCCACCGTGTGTGGGCCTAAAAAGTCCACCAACTTGGTC |
| | | AAGAATAAA |
| 720 | BQ.1.1 | ATAACCAATCTGTGCCCCTTCGACGAGGTATTTAATGCAACTACATT |
| | fragment 4 | CGCTAGCGTCTACGCTTGGAATCGGAAACGCATATCTAACTGTGTAG |
| | (Nucl.) | CAGATTATTCCGTACTTTATAACTTCGCTCCCTTTTTCGCTTTCAAAT |
| | | GTTACGGAGTGAGCCCTACAAAATTGAACGATCTCTGCTTCACCAAC |
| | | GTCTATGCAGACAGTTTTGTTATCCGTGGCAATGAAGTGAGCCAGAT |
| | | TGCACCCGGTCAAACTGGGAACATTGCCGACTATAACTACAAACTTC |
| | | CCGACGACTTCACAGGGTGTGTAATCGCTTGGAACAGCAATAAACT |
| | | CGACTCTACCGTTGGAGGAAACTACAATTATCGCTACCGCCTTTTCC |
| | | GGAAGTCTAAACTCAAGCCCTTTGAGCGGGACATTAGCACTGAGAT |
| | | ATATCAGGCAGGTAACAAACCATGCAATGGAGTAGCTGGTGTAAAC |
| | | TGCTATTTCCCACTTCAGTCATACGGATTTAGACCCACATACGGTGT |
| | | TGGACACCAACCATATCGTGTGGTTGTGCTCAGTTTTGAACTCCTTC |
| | | ATGCCCCTGCCACCGTGTGTGGGCCTAAAAAGTCCACCAACTTGGTC |
| 721 | XBB | AACATTACTAATTTGTGCCCCTTCCACGAAGTCTTTAATGCCACCAC |
| | fragment 1 | TTTTGCATCCGTCTACGCATGGAACCGTAAGCGTATAAGTAACTGCG |
| | (Nucl.) | TAGCCGATTATTCTGTTTTGTATAACTTCGCCCCCTTCTTCGCATTCA |
| | | AGTGTTATGGCGTCAGCCCAACCAAGCTTAATGACCTCTGTTTTACA |
| | | AACGTCTACGCTGATAGCTTCGTGATACGTGGTAATGAAGTAAGTCA |
| | | AATAGCCCCTGGCCAGACTGGTAACATTGCAGACTACAATTATAAA |
| | | CTTCCAGATGACTTTACTGGGTGTGTAATCGCTTGGAATAGTAATAA |
| | | GCTCGACTCTAAGCCCTCCGGGAATTACAACTACCGATATCGGCTTT |
| | | TCAGAAAGTCTAAGCTCAAACCATTTGAGCGCGACATAAGCACAGA |
| | | GATATATCAAGCAGGCAATAAGCCTTGTAACGGCGTAGCTGGTAGT |
| | | AATTGTTACTCCCCCCTGCAAAGTTATGGGTTCAGGCCAACTTATGG |
| | | GGTGGGGCACCAGCCCTACAGAGTTGTCGTACTGAGCTTTGAGCTGC |
| | | TCCATGCTCCAGCTACAGTGTGTGGACCCAAGAAATCCACTAACTTG |
| | | GTTAAAAATAAG |
| 722 | XBB | AACATTACTAATTTGTGCCCCTTCCACGAAGTCTTTAATGCCACCAC |
| | fragment 2 | TTTTGCATCCGTCTACGCATGGAACCGTAAGCGTATAAGTAACTGCG |
| | (Nucl.) | TAGCCGATTATTCTGTTTTGTATAACTTCGCCCCCTTCTTCGCATTCA |
| | | AGTGTTATGGCGTCAGCCCAACCAAGCTTAATGACCTCTGTTTTACA |
| | | AACGTCTACGCTGATAGCTTCGTGATACGTGGTAATGAAGTAAGTCA |
| | | AATAGCCCCTGGCCAGACTGGTAACATTGCAGACTACAATTATAAA |
| | | CTTCCAGATGACTTTACTGGGTGTGTAATCGCTTGGAATAGTAATAA |
| | | GCTCGACTCTAAGCCCTCCGGGAATTACAACTACCGATATCGGCTTT |
| | | TCAGAAAGTCTAAGCTCAAACCATTTGAGCGCGACATAAGCACAGA |
| | | GATATATCAAGCAGGCAATAAGCCTTGTAACGGCGTAGCTGGTAGT |
| | | AATTGTTACTCCCCCCTGCAAAGTTATGGGTTCAGGCCAACTTATGG |
| | | GGTGGGGCACCAGCCCTACAGAGTTGTCGTACTGAGCTTTGAGCTGC |
| | | TCCATGCTCCAGCTACAGTGTGTGGACCCAAGAAATCCACTAACTTG |
| | | GTT |
| 723 | XBB | ATTACTAATTTGTGCCCCTTCCACGAAGTCTTTAATGCCACCACTTTT |
| | fragment 3 | GCATCCGTCTACGCATGGAACCGTAAGCGTATAAGTAACTGCGTAG |
| | (Nucl.) | CCGATTATTCTGTTTTGTATAACTTCGCCCCCTTCTTCGCATTCAAGT |
| | | GTTATGGCGTCAGCCCAACCAAGCTTAATGACCTCTGTTTTACAAAC |
| | | GTCTACGCTGATAGCTTCGTGATACGTGGTAATGAAGTAAGTCAAAT |
| | | AGCCCCTGGCCAGACTGGTAACATTGCAGACTACAATTATAAACTTC |
| | | CAGATGACTTTACTGGGTGTGTAATCGCTTGGAATAGTAATAAGCTC |
| | | GACTCTAAGCCCTCCGGGAATTACAACTACCGATATCGGCTTTTCAG |
| | | AAAGTCTAAGCTCAAACCATTTGAGCGCGACATAAGCACAGAGATA |
| | | TATCAAGCAGGCAATAAGCCTTGTAACGGCGTAGCTGGTAGTAATT |
| | | GTTACTCCCCCCTGCAAAGTTATGGGTTCAGGCCAACTTATGGGGTG |
| | | GGGCACCAGCCCTACAGAGTTGTCGTACTGAGCTTTGAGCTGCTCCA |
| | | TGCTCCAGCTACAGTGTGTGGACCCAAGAAATCCACTAACTTGGTTA |
| | | AAAATAAG |
| 724 | XBB | ATTACTAATTTGTGCCCCTTCCACGAAGTCTTTAATGCCACCACTTTT |
| | fragment 4 | GCATCCGTCTACGCATGGAACCGTAAGCGTATAAGTAACTGCGTAG |
| | (Nucl.) | CCGATTATTCTGTTTTGTATAACTTCGCCCCCTTCTTCGCATTCAAGT |
| | | GTTATGGCGTCAGCCCAACCAAGCTTAATGACCTCTGTTTTACAAAC |
| | | GTCTACGCTGATAGCTTCGTGATACGTGGTAATGAAGTAAGTCAAAT |
| | | AGCCCCTGGCCAGACTGGTAACATTGCAGACTACAATTATAAACTTC |
| | | CAGATGACTTTACTGGGTGTGTAATCGCTTGGAATAGTAATAAGCTC |
| | | GACTCTAAGCCCTCCGGGAATTACAACTACCGATATCGGCTTTTCAG |
| | | AAAGTCTAAGCTCAAACCATTTGAGCGCGACATAAGCACAGAGATA |
| | | TATCAAGCAGGCAATAAGCCTTGTAACGGCGTAGCTGGTAGTAATT |
| | | GTTACTCCCCCCTGCAAAGTTATGGGTTCAGGCCAACTTATGGGGTG |
| | | GGGCACCAGCCCTACAGAGTTGTCGTACTGAGCTTTGAGCTGCTCCA |
| | | TGCTCCAGCTACAGTGTGTGGACCCAAGAAATCCACTAACTTGGTT |
| 725 | BA.4/5 | AACATCACTAATTTGTGTCCCTTTGACGAGGTATTCAACGCCACTCG |
| | fragment | CTTTGCTTCTGTCTATGCCTGGAACCGAAAAAGAATTTCTAATTGCG |
| | (Nucl.) | TCGCTGACTACTCCGTGCTCTACAACTTCGCACCTTTCTTCGCTTTCA |
| | | AGTGTTACGGTGTTTCCCCCACTAAACTTAATGATCTGTGCTTTACTA |
| | | ACGTGTACGCAGACTCATTCGTTATTCGGGGTAACGAGGTTTCCCAA |
| | | ATCGCTCCCGGTCAAACCGGAAACATCGCTGATTACAACTATAAGTT |
| | | GCCTGATGACTTTACTGGGTGTGTCATCGCATGGAATTCCAACAAAC |
| | | TGGATAGTAAAGTTGGAGGTAACTACAATTACCGATACAGGCTTTTC |
| | | CGTAAATCCAATCTGAAGCCCTTCGAGCGCGATATTAGTACTGAAAT |
| | | ATATCAGGCTGGTAATAAACCTTGCAATGGGGTGGCTGGAGTAAAC |
| | | TGCTACTTTCCTCTTCAGAGTTACGGGTTCAGGCCCACCTATGGAGT |
| | | CGGACATCAACCATACCGTGTGGTTGTACTGTCATTTGAACTCCTTC |
| | | ACGCTCCCGCTACCGTGTGCGGCCCAAAGAAAAGTACAAACTTGGT |
| | | TAAAAACAAG |
| 726 | BA.2.75 | AATATAACTAACCTTTGCCCATTTCATGAAGTTTTCAATGCCACTAG |
| | fragment | ATTTGCATCCGTATATGCATGGAACCGTAAACGAATTAGTAATTGCG |
| | (Nucl.) | TCGCAGACTATAGTGTTCTTTACAATTTCGCTCCCTTTTTCGCCTTCA |
| | | AGTGTTATGGGGTCTCTCCTACTAAACTCAATGACCTGTGCTTTACC |
| | | AATGTGTACGCCGATTCCTTCGTTATACGAGGGAATGAGGTAAGTCA |
| | | AATAGCCCCTGGACAAACCGGCAACATTGCTGATTACAATTACAAA |
| | | CTGCCTGACGATTTCACCGGTTGTGTAATAGCCTGGAATTCCAATAA |
| | | ACTGGATTCTAAAGTATCAGGCAACTACAACTATCTTTACAGGTTGT |
| | | TTAGAAAAAGCAAGCTGAAGCCCTTCGAGCGCGATATTTCAACAGA |
| | | GATATATCAAGCAGGAAATAAACCATGCAACGGCGTCGCCGGCTTC |
| | | AATTGCTACTTCCCTTTGCAAAGTTATGGTTTTCGACCTACATACGGT |
| | | GTCGGTCATCAGCCCTACCGCGTGGTCGTCCTGTCCTTTGAACTTCTT |
| | | CACGCCCCAGCCACCGTATGTGGTCCCAAGAAGTCAACTAATCTCGT |
| | | CAAAAATAAA |
| 727 | BA 2.75.2 | AATATCACTAATTTGTGTCCCTTCCATGAGGTTTTCAATGCTACAAC |
| | fragment | ATTCGCCAGCGTCTACGCCTGGAACCGTAAGCGAATTTCAAACTGCG |
| | (Nucl.) | TTGCAGACTATAGCGTGCTCTACAATTTTGCACCCTTTTTCGCCTTCA |
| | | AGTGTTACGGTGTGAGCCCTACTAAGTTGAATGACCTCTGTTTTACA |
| | | AATGTGTACGCTGACTCATTCGTGATACGTGGTAACGAAGTGAGTCA |
| | | AATAGCCCCTGGGCAAACAGGTAACATCGCTGACTATAACTACAAG |
| | | TTGCCCGACGATTTTACAGGGTGTGTTATAGCATGGAACAGTAACAA |
| | | GCTCGATTCAAAGGTGAGCGGAAATTACAACTACCTCTATCGACTCT |
| | | TTAGGAAATCCAAGCTCAAGCCATTCGAGAGAGATATATCAACCGA |
| | | AATTTACCAGGCTGGTAACAAGCCATGCAATGGGGTCGCAGGATCC |
| | | AACTGTTATTTCCCATTGCAGTCATACGGCTTCAGGCCCACTTATGG |
| | | GGTAGGTCATCAACCCTACCGGGTCGTCGTCCTTTCTTTTGAACTTCT |
| | | GCACGCACCAGCCACCGTATGCGGCCCCAAGAAGAGTACTAACCTG |
| | | GTGAAGAACAAA |
| 728 | BA.4.6 | AATATTACCAACCTGTGCCCCTTCGATGAGGTTTTCAACGCCACAAC |
| | fragment | TTTTGCAAGTGTTTACGCCTGGAACCGAAAGCGTATAAGCAATTGTG |
| | (Nucl.) | TTGCAGATTATAGTGTGCTCTATAACTTCGCTCCCTTCTTTGCTTTTA |
| | | AATGCTACGGAGTCTCCCCTACAAAGCTGAACGACCTTTGCTTCACT |
| | | AATGTCTACGCCGATAGCTTTGTTATCAGAGGAAATGAAGTATCACA |
| | | GATCGCACCAGGTCAGACAGGCAACATCGCAGACTATAACTATAAA |
| | | CTTCCCGACGATTTTACTGGCTGTGTCATTGCTTGGAACTCAAATAA |
| | | ACTCGACTCAAAGGTGGGAGGAAATTACAACTATCGTTATAGGCTG |
| | | TTCAGGAAAAGTAATCTCAAGCCATTCGAGCGAGACATTAGTACAG |
| | | AGATTTACCAGGCTGGAAACAAACCTTGCAATGGTGTCGCAGGCGT |
| | | CAACTGCTACTTCCCATTGCAGAGCTACGGCTTCAGGCCAACATACG |
| | | GTGTGGGACACCAGCCTTACCGAGTTGTGGTCCTGTCCTTTGAACTT |
| | | CTCCACGCACCTGCTACCGTCTGTGGACCCAAAAAAAGCACCAATCT |
| | | TGTAAAGAATAAA |

[0120] While the invention has been illustrated and described in detail in the drawings and foregoing description, such illustration and description are to be considered illustrative or exemplary and not restrictive. It will be understood that changes and modifications may be made by those of ordinary skill within the scope of the following claims. In particular, the present invention covers further embodiments with any combination of features from different embodiments described above and below. Additionally, statements made herein characterizing the invention refer to an embodiment of the invention and not necessarily all embodiments.

[0121] The terms used in the claims should be construed to have the broadest reasonable interpretation consistent with the foregoing description. For example, the use of the article “a” or “the” in introducing an element should not be interpreted as being exclusive of a plurality of elements. Likewise, the recitation of “or” should be interpreted as being inclusive, such that the recitation of “A or B” is not exclusive of “A and B,” unless it is clear from the context or the foregoing description that only one of A and B is intended. Further, the recitation of “at least one of A, B and C” should be interpreted as one or more of a group of elements consisting of A, B and C, and should not be interpreted as requiring at least one of each of the listed elements A, B and C, regardless of whether A, B and C are related as categories or otherwise. Moreover, the recitation of “A, B and/or C” or “at least one of A, B or C” should be interpreted as including any singular entity from the listed elements, e.g., A, any subset from the listed elements, e.g., A and B, or the entire list of elements A, B and C.

1. A recombinant polypeptide comprising at least one immunogenic fragment of Severe Acute Respiratory Syndrome Coronavirus 2 (SARS-COV-2) spike glycoprotein and an antibody Fc region.

2. The recombinant polypeptide of claim 1, wherein the at least one fragment of the SARS-COV-2 spike glycoprotein comprises the N-terminal domain of the S1 subunit, the C-terminal domain of the S1 subunit, or both.

3. The recombinant polypeptide of claim 1, wherein the at least one fragment of the SARS-COV-2 spike glycoprotein comprises an amino acid sequence with at least 93% sequence identity to an amino acid sequence selected from the group consisting of SEQ ID NO: 245 (CTD_short_h)₂), SEQ ID NO: 249 (LS2435 Single domain_(GAMMA-Plus)), SEQ ID NO: 253 (BETA_CTD_short_i), SEQ ID NO: 257 (GAMMA_CTD_short_i), SEQ ID NO: 261 (GAMMA_CTD_short_i), SEQ ID NO: 265 (DELTA-Plus_CTD_short_i), SEQ ID NO: 269 (MU_CTD_short_i), SEQ ID NO: 273 (A.30_CTD_short_i), SEQ ID NO: 277 (DELTA-Plus+MU_CTD_short_i), SEQ ID NO: 281 (DELTA-Plus+A.30_CTD_short_i), SEQ ID NO: 285 (BETA_CTD_short_i)₂), SEQ ID NO: 289 ((GAMMA_CTD_short_i)₂), SEQ ID NO: 293 ((DELTA_CTD_short_i)₂), SEQ ID NO: 297 ((DELTA-Plus_CTD_short_i)₂), SEQ ID NO: 301 ((MU_CTD_short_i)₂), SEQ ID NO: 305 ((A.30_CTD_short_i)₂), SEQ ID NO: 309 ((DELTA-Plus+MU_CTD_short_i)₂), SEQ ID NO: 313 ((DELTA-Plus+A.30_CTD_short_i)₂), SEQ ID NO: 317 (Omicron_Boost_CTD_short_i), SEQ ID NO: 321 ((Omicron_Boost_CTD_short_i)₂), SEQ ID NO: 325 (Omicron_CTD_short_i), SEQ ID NO: 329 ((Omicron_CTD_short_i)₂), SEQ ID NO: 333 (OΔ+μ_1_CTD_short_i), SEQ ID NO: 337 ((θΔ+μ_1_CTD_short_i)₂), SEQ ID NO: 341 (OΔ+μ_2_CTD_short_i), SEQ ID NO: 345 ((OΔ+ρ_2_CTD_short_i)₂), SEQ ID NO: 349 (OΔ+μ_3_CTD_short_i), SEQ ID NO: 353 ((OΔ+μ_3_CTD_short_i)₂), SEQ ID NO: 357 (OΔ+μ_4_CTD_short_i), and SEQ ID NO: 361 ((OΔ+μ_4_CTD_short_i)₂), SEQ ID NO: 365 (CTD-gCd01), SEQ ID NO: 366 (CTD-gCd02), SEQ ID NO: 367 (CTD-gCd03), SEQ ID NO: 368 (CTD-gCd04), SEQ ID NO: 369 (CTD-gCd05), SEQ ID NO: 370 (CTD-gCd06), SEQ ID NO: 371 (CTD-gCd07), SEQ ID NO: 372 (CTD-gCd08), SEQ ID NO: 373 (CTD-gCd09), SEQ ID NO: 374 (CTD-gCd10), SEQ ID NO: 375 (CTD-gCd11), SEQ ID NO: 376 (CTD-gCd12), SEQ ID NO: 377 (CTD-gCd13), SEQ ID NO: 378 (CTD-gCd14), SEQ ID NO: 379 (CTD-gCd15), SEQ ID NO: 380 (CTD-gCd16), SEQ ID NO: 381 (CTD-gCd17), SEQ ID NO: 382 (CTD-gCd18), SEQ ID NO: 383 (CTD-gCd19), SEQ ID NO: 384 (CTD-gCd20), SEQ ID NO: 385 (CTD-gCd21), SEQ ID NO: 386 (CTD-gCd22), SEQ ID NO: 387 (CTD-gCd23), SEQ ID NO: 388 (CTD-gCd24), SEQ ID NO: 389 (CTD-gCd25), SEQ ID NO: 390 (CTD-gCd26), SEQ ID NO: 391 (CTD-gCd27), SEQ ID NO: 392 (CTD-gCd28), SEQ ID NO: 393 (CTD-gCd29), SEQ ID NO: 394 (CTD-gCd30), SEQ ID NO: 395 (CTD-gCd31), SEQ ID NO: 396 (CTD-gCd32), SEQ ID NO: 397 (CTD-gCd33), SEQ ID NO: 398 (CTD-gCd34), SEQ ID NO: 399 (CTD-gCd35), SEQ ID NO: 400 (CTD-gCd36), SEQ ID NO: 401 (CTD-gCd37), SEQ ID NO: 402 (CTD-gCd38), SEQ ID NO: 403 (CTD-gN01), SEQ ID NO: 404 (CTD-gN02), SEQ ID NO: 405 (CTD-gN03), SEQ ID NO: 406 (CTD-gN04), SEQ ID NO: 407 (CTD-gN05), SEQ ID NO: 408 (CTD-gN06), SEQ ID NO: 409 (CTD-gN07), SEQ ID NO: 410 (CTD-gN08), SEQ ID NO: 411 (CTD-gN09), SEQ ID NO: 412 (CTD-gN10), SEQ ID NO: 413 (CTD-gN11), SEQ ID NO: 414 (CTD-gN12), SEQ ID NO: 415 (CTD-gN13) SEQ ID NO: 416 (CTD-gN14), SEQ ID NO: 417 (CTD-gN15), SEQ ID NO: 418 (CTD-gN16), SEQ ID NO: 419 (CTD-gN17), SEQ ID NO: 420 (CTD-gN18), SEQ ID NO: 421 (CTD-gN19), SEQ ID NO: 422 (CTD-gN20), SEQ ID NO: 423 (CTD-gN21), SEQ ID NO: 424 (CTD-gN22), SEQ ID NO: 425 (CTD-gN23), SEQ ID NO: 426 (CTD-gN24), SEQ ID NO: 427 (CTD-gN25), SEQ ID NO: 428 (CTD-gN26), SEQ ID NO: 429 (CTD-gN27), SEQ ID NO: 430 (CTD-gN28), SEQ ID NO: 431 (CTD-gN29), SEQ ID NO: 432 (CTD-gN30), SEQ ID NO: 433 (CTD-gN31), SEQ ID NO: 434 (CTD-gN32), SEQ ID NO: 435 (CTD-gN33), SEQ ID NO: 436 (CTD-gN34), SEQ ID NO: 437 (CTD-gN35), SEQ ID NO: 438 (CTD-gN36), SEQ ID NO: 439 (CTD-gN37), SEQ ID NO: 440 (CTD-gN38), SEQ ID NO: 441 (CTD-gN39), SEQ ID NO: 442 (CTD-gN40), SEQ ID NO: 443 (CTD-gN41), SEQ ID NO: 444 (CTD-gN42), SEQ ID NO: 445 (CTD-gN43), SEQ ID NO: 446 (CTD-gN44), SEQ ID NO: 447 (CTD-gN45), SEQ ID NO: 448 (CTD-gN46), SEQ ID NO: 449 (CTD-gN47), and SEQ ID NOs: 705-716.

4. The recombinant polypeptide of claim 1, wherein the polypeptide comprises an amino acid sequence selected from the group consisting of SEQ ID NOS: 245, 249, 253, 257, 261, 265, 269, 273, 277, 281, 285, 289, 293, 297, 301, 305, 309, 313, 317, 321, 325, 329, 333, 337, 341, 345, 349, 353, 357, 361 365-449, and 705-716.

5. The recombinant polypeptide of claim 1, wherein the polypeptide comprises at least two immunogenic fragments.

6. The recombinant polypeptide of claim 5, wherein each of the at least two immunogenic fragments comprises an amino acid sequence with at least 93%, sequence identity to an amino acid sequence selected from the group consisting of SEQ ID NO: 245 (CTD_short_h) 2), SEQ ID NO: 249 (LS2435 Single domain_(GAMMA-Plus)), SEQ ID NO: 253 (BETA_CTD_short_i), SEQ ID NO: 257 (GAMMA_CTD_short_i), SEQ ID NO: 261 (GAMMA_CTD_short_i), SEQ ID NO: 265 (DELTA-Plus_CTD_short_i), SEQ ID NO: 269 (MU_CTD_short_i), SEQ ID NO: 273 (A,30_CTD_short_i), SEQ ID NO: 277 (DELTA-Plus+MU_CTD_short_i), SEQ ID NO: 281 (DELTA-Plus+A.30_CTD_short_i), SEQ ID NO: 285 (BETA_CTD_short_i)₂), SEQ ID NO: 289 ((GAMMA_CTD_short_i)₂), SEQ ID NO: 293 ((DELTA_CTD_short_i)₂), SEQ ID NO: 297 ((DELTA-Plus_CTD_short_i)₂), SEQ ID NO: 301 ((MU_CTD_short_i)₂), SEQ ID NO: 305 ((A.30_CTD_short_i)₂), SEQ ID NO: 309 ((DELTA-Plus+MU_CTD_short_i)₂), SEQ ID NO: 313 ((DELTA-Plus+A.30_CTD_short_i)₂), SEQ ID NO: 317 (Omicron_Boost_CTD_short_i), SEQ ID NO: 321 ((Omicron_Boost_CTD_short_i)₂), SEQ ID NO: 325 (Omicron_CTD_short_i), SEQ ID NO: 329 ((Omicron_CTD_short_i)₂), SEQ ID NO: 333 (OΔ+μ_1_CTD_short_i), SEQ ID NO: 337 ((OΔ+μ_1_CTD_short_i)₂), SEQ ID NO: 341 (OΔ+μ_2_CTD_short_i), SEQ ID NO: 345 ((OΔ+μ_2_CTD_short_i)₂), SEQ ID NO: 349 (OΔ+μ_3_CTD_short_i), SEQ ID NO: 353 ((OΔ+μ_3_CTD_short_i)₂), SEQ ID NO: 357 (OΔ+μ_4_CTD_short_i), SEQ ID NO: 361 ((OΔ+μ_4_CTD_short_i)₂), SEQ ID NO: 365 (CTD-gCd01), SEQ ID NO: 366 (CTD-gCd02), SEQ ID NO: 367 (CTD-gCd03), SEQ ID NO: 368 (CTD-gCd04), SEQ ID NO: 369 (CTD-gCd05), SEQ ID NO: 370 (CTD-gCd06), SEQ ID NO: 371 (CTD-gCd07), SEQ ID NO: 372 (CTD-gCd08), SEQ ID NO: 373 (CTD-gCd09), SEQ ID NO: 374 (CTD-gCd10), SEQ ID NO: 375 (CTD-gCd11), SEQ ID NO: 376 (CTD-gCd12), SEQ ID NO: 377 (CTD-gCd13), SEQ ID NO: 378 (CTD-gCd14), SEQ ID NO: 379 (CTD-gCd15), SEQ ID NO: 380 (CTD-gCd16), SEQ ID NO: 381 (CTD-gCd17), SEQ ID NO: 382 (CTD-gCd18), SEQ ID NO: 383 (CTD-gCd19), SEQ ID NO: 384 (CTD-gCd20), SEQ ID NO: 385 (CTD-gCd21), SEQ ID NO: 386 (CTD-gCd22), SEQ ID NO: 387 (CTD-gCd23), SEQ ID NO: 388 (CTD-gCd24), SEQ ID NO: 389 (CTD-gCd25), SEQ ID NO: 390 (CTD-gCd26), SEQ ID NO: 391 (CTD-gCd27), SEQ ID NO: 392 (CTD-gCd28), SEQ ID NO: 393 (CTD-gCd29), SEQ ID NO: 394 (CTD-gCd30), SEQ ID NO: 395 (CTD-gCd31), SEQ ID NO: 396 (CTD-gCd32), SEQ ID NO: 397 (CTD-gCd33), SEQ ID NO: 398 (CTD-gCd34), SEQ ID NO: 399 (CTD-gCd35), SEQ ID NO: 400 (CTD-gCd36), SEQ ID NO: 401 (CTD-gCd37), SEQ ID NO: 402 (CTD-gCd38), SEQ ID NO: 403 (CTD-gN01), SEQ ID NO: 404 (CTD-gN02), SEQ ID NO: 405 (CTD-gN03), SEQ ID NO: 406 (CTD-gN04), SEQ ID NO: 407 (CTD-gN05), SEQ ID NO: 408 (CTD-gN06), SEQ ID NO: 409 (CTD-gN07), SEQ ID NO: 410 (CTD-gN08), SEQ ID NO: 411 (CTD-gN09), SEQ ID NO: 412 (CTD-gN10), SEQ ID NO: 413 (CTD-gN11), SEQ ID NO: 414 (CTD-gN12), SEQ ID NO: 415 (CTD-gN13) SEQ ID NO: 416 (CTD-gN14), SEQ ID NO: 417 (CTD-gN15), SEQ ID NO: 418 (CTD-gN16), SEQ ID NO: 419 (CTD-gN17), SEQ ID NO: 420 (CTD-gN18), SEQ ID NO: 421 (CTD-gN19), SEQ ID NO: 422 (CTD-gN20), SEQ ID NO: 423 (CTD-gN21), SEQ ID NO: 424 (CTD-gN22), SEQ ID NO: 425 (CTD-gN23), SEQ ID NO: 426 (CTD-gN24), SEQ ID NO: 427 (CTD-gN25), SEQ ID NO: 428 (CTD-gN26), SEQ ID NO: 429 (CTD-gN27), SEQ ID NO: 430 (CTD-gN28), SEQ ID NO: 431 (CTD-gN29), SEQ ID NO: 432 (CTD-gN30), SEQ ID NO: 433 (CTD-gN31), SEQ ID NO: 434 (CTD-gN32), SEQ ID NO: 435 (CTD-gN33), SEQ ID NO: 436 (CTD-gN34), SEQ ID NO: 437 (CTD-gN35), SEQ ID NO: 438 (CTD-gN36), SEQ ID NO: 439 (CTD-gN37), SEQ ID NO: 440 (CTD-gN38), SEQ ID NO: 441 (CTD-gN39), SEQ ID NO: 442 (CTD-gN40), SEQ ID NO: 443 (CTD-gN41), SEQ ID NO: 444 (CTD-gN42), SEQ ID NO: 445 (CTD-gN43), SEQ ID NO: 446 (CTD-gN44), SEQ ID NO: 447 (CTD-gN45), SEQ ID NO: 448 (CTD-gN46), SEQ ID NO: 449 (CTD-gN47), and SEQ ID NOs: 705-716.

7. The recombinant polypeptide of claim 5, wherein each of the at least two immunogenic fragments comprises an amino acid sequence selected from the group consisting of SEQ ID NOS: 245, 249, 253, 257, 261, 265, 269, 273, 277, 281, 285, 289, 293, 297, 301, 305, 309, 313, 317, 321, 325, 329, 333, 337, 341, 345, 349, 353, 357, 361, 365-449, and 705-716.

8. The recombinant polypeptide of claim 5, wherein each immunogenic fragment of the at least two immunogenic fragments comprises the same amino acid sequence.

9. The recombinant polypeptide of claim 5, wherein each immunogenic fragment of the at least two immunogenic fragments comprises a different amino acid sequence from the other immunogenic fragments.

10. The recombinant polypeptide of claim 1, wherein the polypeptide comprises two, three, four, or five immunogenic fragments.

11. The recombinant polypeptide of claim 5, wherein the at least two immunogenic fragments are connected to each other via a linker.

12. The recombinant polypeptide of claim 11, wherein the linker is a polypeptide comprising an amino acid sequence of 1-35 residues, wherein each residue is independently serine or glycine.

13. The recombinant polypeptide of claim 1, wherein the at least one immunogenic fragment of the SARS-COV-2 spike glycoprotein is connected to the antibody Fc region via a linker.

14. The recombinant polypeptide of claim 13, wherein the linker comprises an amino acid sequence selected from the group consisting of SEQ ID NO: 65 (Fc1), SEQ ID NO: 67 (Fc1-TEV), SEQ ID NO: 69 (Fc1-Rv3C), SEQ ID NO: 193 (Short), SEQ ID NO: 195 (Medium), and SEQ ID NO: 197 (Long).

15. The recombinant polypeptide of claim 1, wherein the antibody Fc region is from a human IgG1 antibody or derived therefrom.

16. The recombinant polypeptide of claim 15, wherein the antibody Fc region comprises the amino acid sequence of SEQ ID NO: 71.

17. The recombinant polypeptide of claim 1, wherein the polypeptide comprises an amino acid sequence with at least 93%, sequence identity to an amino acid sequence selected from the group consisting of SEQ ID NO: 247 (CTD_short_h) 2-Fc), SEQ ID NO: 251 (LS2435 Single domain_(GAMMA-Plus)-Fc), SEQ ID NO: 255 (BETA_CTD_short_i-Fc), SEQ ID NO: 259 (GAMMA_CTD_short_i-Fc), SEQ ID NO: 263 (GAMMA_CTD_short_i-Fc), SEQ ID NO: 267 (DELTA-Plus_CTD_short_i-Fc), SEQ ID NO: 271 (MU_CTD_short_i-Fc), SEQ ID NO: 275 (A.30_CTD_short_i-Fc), SEQ ID NO: 279 (DELTA-Plus+MU_CTD_short_i-Fc), SEQ ID NO: 283 (DELTA-Plus+A.30_CTD_short i-Fc), SEQ ID NO: 287 (BETA_CTD_short_i)₂-Fc), SEQ ID NO: 291 ((GAMMA_CTD_short_i)₂-Fc), SEQ ID NO: 295 ((DELTA_CTD_short_i)₂-Fc), SEQ ID NO: 299 ((DELTA-Plus_CTD_short_i)₂-Fc), SEQ ID NO: 303 ((MU_CTD_short_i)₂-Fc), SEQ ID NO: 307 ((A.30_CTD_short_i)₂-Fc), SEQ ID NO: 311 ((DELTA-Plus+MU_CTD_short_i)₂-Fc), SEQ ID NO: 315 ((DELTA-Plus+A.30_CTD_short_i)₂-Fc), SEQ ID NO: 319 (Omicron_Boost_CTD_short_i-Fc), SEQ ID NO: 323 ((Omicron_Boost_CTD_short_i)₂-Fc), SEQ ID NO: 327 (Omicron_CTD_short_i-Fc), SEQ ID NO: 331 ((Omicron_CTD_short_i)₂-Fc), SEQ ID NO: 335 (OΔ+μ_1_CTD_short_i-Fc), SEQ ID NO: 339 (OΔ+μ_1_CTD_short_i)₂-Fc), SEQ ID NO: 343 (OA+μ _2_CTD_short_i-Fc), SEQ ID NO: 347 ((OΔ+μ_2_CTD_short_i)₂-Fc), SEQ ID NO: 351 (OΔ+μ_3_CTD_short_i-Fc), SEQ ID NO: 355 ((OΔ+μ_3_CTD_short_i)₂-Fc), SEQ ID NO: 359 (OΔ+μ_4_CTD_short_i-Fc), SEQ ID NO: 363 ((OΔ+μ_4_CTD_short_i)₂-Fc) SEQ ID NO: 535 (CTD-gCd01-Fc), SEQ ID NO: 536 (CTD-gCd02-Fc), SEQ ID NO: 537 (CTD-gCd03-Fc), SEQ ID NO: 538 (CTD-gCd04-Fc), SEQ ID NO: 539 (CTD-gCd05-Fc), SEQ ID NO: 540 (CTD-gCd06-Fc), SEQ ID NO: 541 (CTD-gCd07-Fc), SEQ ID NO: 542 (CTD-gCd08-Fc), SEQ ID NO: 543 (CTD-gCd09-Fc), SEQ ID NO: 544 (CTD-gCd10-Fc), SEQ ID NO: 545 (CTD-gCd11-Fc), SEQ ID NO: 546 (CTD-gCd12-Fc), SEQ ID NO: 547 (CTD-gCd13-Fc), SEQ ID NO: 548 (CTD-gCd14-Fc), SEQ ID NO: 549 (CTD-gCd15-Fc), SEQ ID NO: 550 (CTD-gCd16-Fc), SEQ ID NO: 551 (CTD-gCd17-Fc), SEQ ID NO: 552 (CTD-gCd18-Fc), SEQ ID NO: 553 (CTD-gCd19-Fc), SEQ ID NO: 554 (CTD-gCd20-Fc), SEQ ID NO: 555 (CTD-gCd21-Fc), SEQ ID NO: 556 (CTD-gCd22-Fc), SEQ ID NO: 557 (CTD-gCd23-Fc), SEQ ID NO: 558 (CTD-gCd24-Fc), SEQ ID NO: 559 (CTD-gCd25-Fc), SEQ ID NO: 560 (CTD-gCd26-Fc), SEQ ID NO: 561 (CTD-gCd27-Fc), SEQ ID NO: 562 (CTD-gCd28-Fc), SEQ ID NO: 563 (CTD-gCd29-Fc), SEQ ID NO: 564 (CTD-gCd30-Fc), SEQ ID NO: 565 (CTD-gCd31-Fc), SEQ ID NO: 566 (CTD-gCd32-Fc), SEQ ID NO: 567 (CTD-gCd33-Fc), SEQ ID NO: 568 (CTD-gCd34-Fc), SEQ ID NO: 569 (CTD-gCd35-Fc), SEQ ID NO: 570 (CTD-gCd36-Fc), SEQ ID NO: 571 (CTD-gCd37-Fc), SEQ ID NO: 572 (CTD-gCd38-Fc), SEQ ID NO: 573 (CTD-gN01-Fc), SEQ ID NO: 574 (CTD-gN02), SEQ ID NO: 575 (CTD-gN03-Fc), SEQ ID NO: 576 (CTD-gN04-Fc), SEQ ID NO: 577 (CTD-gN05-Fc), SEQ ID NO: 578 (CTD-gN06-Fc), SEQ ID NO: 579 (CTD-gN07-Fc), SEQ ID NO: 580 (CTD-gN08-Fc), SEQ ID NO: 581 (CTD-gN09-Fc), SEQ ID NO: 582 (CTD-gN10-Fc), SEQ ID NO: 583 (CTD-gN11-Fc), SEQ ID NO: 584 (CTD-gN12-Fc), SEQ ID NO: 585 (CTD-gN13-Fc) SEQ ID NO: 586 (CTD-gN14-Fc), SEQ ID NO: 587 (CTD-gN15-Fc), SEQ ID NO: 588 (CTD-gN16-Fc), SEQ ID NO: 589 (CTD-gN17-Fc), SEQ ID NO: 590 (CTD-gN18-Fc), SEQ ID NO: 591 (CTD-gN19-Fc), SEQ ID NO: 592 (CTD-gN20-Fc), SEQ ID NO: 593 (CTD-gN21-Fc), SEQ ID NO: 594 (CTD-gN22-Fc), SEQ ID NO: 595 (CTD-gN23-Fc), SEQ ID NO: 596 (CTD-gN24-Fc), SEQ ID NO: 597 (CTD-gN25-Fc), SEQ ID NO: 598 (CTD-gN26-Fc), SEQ ID NO: 599 (CTD-gN27-Fc), SEQ ID NO: 600 (CTD-gN28-Fc), SEQ ID NO: 601 (CTD-gN29-Fc), SEQ ID NO: 602 (CTD-gN30-Fc), SEQ ID NO: 603 (CTD-gN31-Fc), SEQ ID NO: 604 (CTD-gN32-Fc), SEQ ID NO: 605 (CTD-gN33-Fc), SEQ ID NO: 606 (CTD-gN34-Fc), SEQ ID NO: 607 (CTD-gN35-Fc), SEQ ID NO: 608 (CTD-gN36-Fc), SEQ ID NO: 609 (CTD-gN37-Fc), SEQ ID NO: 610 (CTD-gN38-Fc), SEQ ID NO: 611 (CTD-gN39-Fc), SEQ ID NO: 612 (CTD-gN40-Fc), SEQ ID NO: 613 (CTD-gN41-Fc), SEQ ID NO: 614 (CTD-gN42-Fc), SEQ ID NO: 615 (CTD-gN43-Fc), SEQ ID NO: 616 (CTD-gN44-Fc), SEQ ID NO: 617 (CTD-gN45-Fc), SEQ ID NO: 618 (CTD-gN46-Fc), SEQ ID NO: 619 (CTD-gN47), and SEQ ID NOs: 705-716.

18. The recombinant polypeptide of claim 17, wherein the polypeptide comprises an amino acid sequence selected from the group consisting of SEQ ID NOS: 247, 251, 255, 259, 263, 267, 271, 275, 279, 283, 287, 291, 295, 299, 303, 307, 311, 315, 319, 323, 327, 331, 335, 339, 343, 347, 351, 355, 359, 363, 535-619, and 705-716.

19. A recombinant polynucleotide encoding the recombinant polypeptide of claim 1.

20. The recombinant polynucleotide of claim 19, wherein the polynucleotide comprises a nucleic acid sequence with at least 93%, sequence identity to a nucleic acid sequence selected from the group consisting of SEQ ID NO: 248 (CTD_short_h) 2-Fc), SEQ ID NO: 252 (LS2435 Single domain_(GAMMA-Plus)-Fc), SEQ ID NO: 256 (BETA_CTD_short_i-Fc), SEQ ID NO: 260 (GAMMA_CTD_short_i-Fc), SEQ ID NO: 264 (GAMMA_CTD_short_i-Fc), SEQ ID NO: 268 (DELTA-Plus_CTD_short_i-Fc), SEQ ID NO: 272 (MU_CTD_short_i-Fc), SEQ ID NO: 276 (A.30_CTD_short_i-Fc), SEQ ID NO: 280 (DELTA-Plus+MU_CTD_short_i-Fc), SEQ ID NO: 284 (DELTA-Plus+A.30_CTD_short_i-Fc), SEQ ID NO: 288 (BETA_CTD_short_i)₂-Fc), SEQ ID NO: 292 ((GAMMA_CTD_short_i)₂-Fc), SEQ ID NO: 296 ((DELTA_CTD_short_i)₂-Fc), SEQ ID NO: 300 ((DELTA-Plus_CTD_short_i)₂-Fc), SEQ ID NO: 304 ((MU_CTD_short_i)₂-Fc), SEQ ID NO: 308 ((A.30_CTD_short_i)₂-Fc), SEQ ID NO: 312 ((DELTA-Plus+MU_CTD_short_i)₂-Fc), SEQ ID NO: 316 ((DELTA-Plus+A.30_CTD_short_i)₂-Fc), SEQ ID NO: 320 (Omicron_Boost_CTD_short_i-Fc), SEQ ID NO: 324 ((Omicron_Boost_CTD_short_i)₂-Fc), SEQ ID NO: 328 (Omicron_CTD_short_i-Fc), SEQ ID NO: 332 ((Omicron_CTD_short_i)₂-Fc), SEQ ID NO: 336 (OΔ+μ_1_CTD_short_i-Fc), SEQ ID NO: 340 ((OΔ+μ_1_CTD_short_i)₂-Fc), SEQ ID NO: 344 (OΔ+μ_2_CTD_short_i-Fc), SEQ ID NO: 348 ((OA+μ_2_CTD_short_i)₂-Fc), SEQ ID NO: 352 (OΔ+μ_3_CTD_short_i-Fc), SEQ ID NO: 356 ((OΔ+μ_3_CTD_short_i)₂-Fc), SEQ ID NO: 360 (OΔ+μ_4_CTD_short_i-Fc), SEQ ID NO: 364 ((OΔ+μ_4_CTD_short_i)₂-Fc), SEQ ID NO: 620 (CTD-gCd01-Fc), SEQ ID NO: 621 (CTD-gCd02-Fc), SEQ ID NO: 622 (CTD-gCd03-Fc), SEQ ID NO: 623 (CTD-gCd04-Fc), SEQ ID NO: 624 (CTD-gCd05-Fc), SEQ ID NO: 625 (CTD-gCd06-Fc), SEQ ID NO: 626 (CTD-gCd07-Fc), SEQ ID NO: 627 (CTD-gCd08-Fc), SEQ ID NO: 628 (CTD-gCd09-Fc), SEQ ID NO: 629 (CTD-gCd10-Fc), SEQ ID NO: 630 (CTD-gCd11-Fc), SEQ ID NO: 631 (CTD-gCd12-Fc), SEQ ID NO: 632 (CTD-gCd13-Fc), SEQ ID NO: 633 (CTD-gCd14-Fc), SEQ ID NO: 634 (CTD-gCd15-Fc), SEQ ID NO: 635 (CTD-gCd16-Fc), SEQ ID NO: 636 (CTD-gCd17-Fc), SEQ ID NO: 637 (CTD-gCd18-Fc), SEQ ID NO: 638 (CTD-gCd19-Fc), SEQ ID NO: 639 (CTD-gCd20-Fc), SEQ ID NO: 640 (CTD-gCd21-Fc), SEQ ID NO: 641 (CTD-gCd22-Fc), SEQ ID NO: 642 (CTD-gCd23-Fc), SEQ ID NO: 643 (CTD-gCd24-Fc), SEQ ID NO: 644 (CTD-gCd25-Fc), SEQ ID NO: 645 (CTD-gCd26-Fc), SEQ ID NO: 646 (CTD-gCd27-Fc), SEQ ID NO: 647 (CTD-gCd28-Fc), SEQ ID NO: 648 (CTD-gCd29-Fc), SEQ ID NO: 649 (CTD-gCd30-Fc), SEQ ID NO: 650 (CTD-gCd31-Fc), SEQ ID NO: 651 (CTD-gCd32-Fc), SEQ ID NO: 652 (CTD-gCd33-Fc), SEQ ID NO: 653 (CTD-gCd34-Fc), SEQ ID NO: 654 (CTD-gCd35-Fc), SEQ ID NO: 655 (CTD-gCd36-Fc), SEQ ID NO: 656 (CTD-gCd37-Fc), SEQ ID NO: 657 (CTD-gCd38-Fc), SEQ ID NO: 658 (CTD-gN01-Fc), SEQ ID NO: 659 (CTD-gN02), SEQ ID NO: 660 (CTD-gN03-Fc), SEQ ID NO: 661 (CTD-gN04-Fc), SEQ ID NO: 662 (CTD-gN05-Fc), SEQ ID NO: 663 (CTD-gN06-Fc), SEQ ID NO: 664 (CTD-gN07-Fc), SEQ ID NO: 665 (CTD-gN08-Fc), SEQ ID NO: 666 (CTD-gN09-Fc), SEQ ID NO: 667 (CTD-gN10-Fc), SEQ ID NO: 668 (CTD-gN11-Fc), SEQ ID NO: 669 (CTD-gN12-Fc), SEQ ID NO: 670 (CTD-gN13-Fc) SEQ ID NO: 671 (CTD-gN14-Fc), SEQ ID NO: 672 (CTD-gN15-Fc), SEQ ID NO: 673 (CTD-gN16-Fc), SEQ ID NO: 674 (CTD-gN17-Fc), SEQ ID NO: 675 (CTD-gN18-Fc), SEQ ID NO: 676 (CTD-gN19-Fc), SEQ ID NO: 677 (CTD-gN20-Fc), SEQ ID NO: 678 (CTD-gN21-Fc), SEQ ID NO: 679 (CTD-gN22-Fc), SEQ ID NO: 680 (CTD-gN23-Fc), SEQ ID NO: 681 (CTD-gN24-Fc), SEQ ID NO: 682 (CTD-gN25-Fc), SEQ ID NO: 683 (CTD-gN26-Fc), SEQ ID NO: 684 (CTD-gN27-Fc), SEQ ID NO: 685 (CTD-gN28-Fc), SEQ ID NO: 686 (CTD-gN29-Fc), SEQ ID NO: 687 (CTD-gN30-Fc), SEQ ID NO: 688 (CTD-gN31-Fc), SEQ ID NO: 689 (CTD-gN32-Fc), SEQ ID NO: 690 (CTD-gN33-Fc), SEQ ID NO: 691 (CTD-gN34-Fc), SEQ ID NO: 692 (CTD-gN35-Fc), SEQ ID NO: 693 (CTD-gN36-Fc), SEQ ID NO: 694 (CTD-gN37-Fc), SEQ ID NO: 695 (CTD-gN38-Fc), SEQ ID NO: 696 (CTD-gN39-Fc), SEQ ID NO: 697 (CTD-gN40-Fc), SEQ ID NO: 698 (CTD-gN41-Fc), SEQ ID NO: 699 (CTD-gN42-Fc), SEQ ID NO: 700 (CTD-gN43-Fc), SEQ ID NO: 701 (CTD-gN44-Fc), SEQ ID NO: 702 (CTD-gN45-Fc), SEQ ID NO: 703 (CTD-gN46-Fc), SEQ ID NO: 704 (CTD-gN47), and SEQ ID NOs: 717-728.

21. The recombinant polynucleotide of claim 20, wherein the polynucleotide comprises a nucleic acid sequence selected from the group consisting of SEQ ID NO: 248, 252, 256, 260, 264, 268, 272, 276, 280, 284, 288, 292, 296, 300, 304, 308, 312, 316, 320, 324, 328, 332, 336, 340, 344, 348, 352, 356, 360, 364, 620-704, and 717-728.

22. The recombinant polynucleotide of claim 19, wherein the nucleic acid sequence has been codon optimized.

23. A pharmaceutical composition comprising the recombinant polypeptide of claim 1, and a pharmaceutically acceptable carrier.

24. The pharmaceutical composition of claim 23, wherein the pharmaceutical composition further comprises at least one adjuvant, and
wherein the at least one adjuvant is selected from the group consisting of alum adjuvants, emulsion adjuvants, and pattern recognition receptor agonist adjuvants, or
wherein the at least one adjuvant is AS03, MF59, CpG, Squalene Emulsion, Alum, aluminum hydroxide gels, calcium phosphate hydroxide, paraffin oil, cytokines (IL-1, IL-2, IL-12), killed bacterial products such as Bordetella and Mycobacterium bacteria, bacterial toxoids, squalene and DL-α-tocopherol emulsions, aluminum phosphate gels, saponins, cyclic dinucleotides, and TLR agonists, and any combination thereof, or
wherein the at least one adjuvant is a squalene-oil-in-water emulsion adjuvant.

25-27. (canceled)

28. A vector comprising the recombinant polynucleotide of claim 19.

29. An isolated cell comprising the polypeptide encoded by the recombinant polynucleotide of claim 19.

30. A method for preventing, inhibiting, reducing, eliminating,
protecting, or delaying the onset of an infection or an infectious clinical condition caused by a beta coronavirus in a subject comprising administering to the subject the recombinant polypeptide of claim 1.

31. A method for inducing an immune response against a beta coronavirus in a subject comprising administering to the subject the recombinant polypeptide of claim 1.

32. The method of claim 30, wherein the recombinant polypeptide is administered by oral, parenteral, subcutaneous, intravenous, intramuscular, intranasal, intrapulmonary, intraarterial, intrathecal, or interperitoneal administration.

33. The method of claim 30, wherein the coronavirus is selected from the group consisting of SARS-COV-2, SARS-COV, and MERS-COV.

34. The method of claim 30, wherein the subject is a mammal.

35-36. (canceled)

The application's sequence listing, which the Patent Office published only in electronic form, follows.

SEQUENCE LISTING (704 sequences)

SEQ ID NO: 1 - protein, 337 aa, synthetic construct
  REGION 1..337: note = CTD_long_a
TLKSFTVEKGIYQTSNFRVQPTESIVRFPNITNLCPFGEVFNATRFASVYAWNRKRISNCVADYSVLYNSASFSTFKCYGVSPTKLNDLCFTNVYADSFVIRGDEVRQIAPGQTGKIADYNYKLPDDFTGCVIAWNSNNLDSKVGGNYNYLYRLFRKSNLKPFERDISTEIYQAGSTPCNGVEGFNCYFPLQSYGFQPTNGVGYQPYRVVVLSFELLHAPATVCGPKKSTNLVKNKCVNFNFNGLTGTGVLTESNKKFLPFQQFGRDIADTTDAVRDPQTLEILDITPCSFGGVSVITPGTNTSNQVAVLYQDVNCTEVPVAIHADQLTPTWRVYST

SEQ ID NO: 2 - DNA, 1011 bp, synthetic construct
  misc_feature 1..1011: note = CTD_long_a
  source 1..1011: mol_type = other DNA
accctcaagtctttcactgtggagaaagggatctatcaaaccagcaattttagggttcagcccaccgaatcaatagtacggttcccaaatatcactaatctttgccccttcggggaagtatttaacgctactcgatttgctagcgtatatgcctggaaccggaagagaataagcaactgtgttgcagactatagcgtgctttacaattccgcatcctttagtaccttcaaatgttacggtgtgagccccaccaaactcaatgatctctgtttcacaaacgtgtacgcagatagtttcgttatacgcggggacgaagtacggcagatagcccctggccagacaggaaagatagccgattacaactacaaacttccagacgattttacagggtgtgtgatcgcttggaattcaaataacctggactccaaagtgggaggcaactataattacctgtaccgactgttccgcaaaagcaacttgaaacctttcgagcgagatatatcaaccgaaatctaccaagctggttctacaccttgtaatggtgtggagggatttaactgctacttccctcttcagtcctatggatttcagcctacaaatggagtcgggtatcaaccctatagagtcgtggtgttgtcatttgaacttctccatgcacctgctactgtctgtggtccaaaaaagtccactaatcttgtaaaaaacaaatgcgtgaacttcaatttcaatggcctcaccggaacaggtgttttgacagaatctaacaaaaaattccttcccttccagcaattcgggagagatatcgctgacacaaccgacgccgtaagagatccccagactcttgagatccttgacatcaccccatgcagttttggaggcgtgtctgtgatcacccctggcacaaacacctcaaaccaggtggctgtgctgtatcaagatgtcaattgcaccgaggtgcctgtggcaatacatgctgaccagctcaccccaacctggcgagtgtactctacc

SEQ ID NO: 3 - protein, 337 aa, synthetic construct
  REGION 1..337: note = CTD_long_a_D614G
TLKSFTVEKGIYQTSNFRVQPTESIVRFPNITNLCPFGEVFNATRFASVYAWNRKRISNCVADYSVLYNSASFSTFKCYGVSPTKLNDLCFTNVYADSFVIRGDEVRQIAPGQTGKIADYNYKLPDDFTGCVIAWNSNNLDSKVGGNYNYLYRLFRKSNLKPFERDISTEIYQAGSTPCNGVEGFNCYFPLQSYGFQPTNGVGYQPYRVVVLSFELLHAPATVCGPKKSTNLVKNKCVNFNFNGLTGTGVLTESNKKFLPFQQFGRDIADTTDAVRDPQTLEILDITPCSFGGVSVITPGTNTSNQVAVLYQGVNCTEVPVAIHADQLTPTWRVYST

SEQ ID NO: 4 - DNA, 1011 bp, synthetic construct
  misc_feature 1..1011: note = CTD_long_a_D614G
  source 1..1011: mol_type = other DNA
accctcaagtctttcactgtggagaaagggatctatcaaaccagcaattttagggttcagcccaccgaatcaatagtacggttcccaaatatcactaatctttgccccttcggggaagtatttaacgctactcgatttgctagcgtatatgcctggaaccggaagagaataagcaactgtgttgcagactatagcgtgctttacaattccgcatcctttagtaccttcaaatgttacggtgtgagccccaccaaactcaatgatctctgtttcacaaacgtgtacgcagatagtttcgttatacgcggggacgaagtacggcagatagcccctggccagacaggaaagatagccgattacaactacaaacttccagacgattttacagggtgtgtgatcgcttggaattcaaataacctggactccaaagtgggaggcaactataattacctgtaccgactgttccgcaaaagcaacttgaaacctttcgagcgagatatatcaaccgaaatctaccaagctggttctacaccttgtaatggtgtggagggatttaactgctacttccctcttcagtcctatggatttcagcctacaaatggagtcgggtatcaaccctatagagtcgtggtgttgtcatttgaacttctccatgcacctgctactgtctgtggtccaaaaaagtccactaatcttgtaaaaaacaaatgcgtgaacttcaatttcaatggcctcaccggaacaggtgttttgacagaatctaacaaaaaattccttcccttccagcaattcgggagagatatcgctgacacaaccgacgccgtaagagatccccagactcttgagatccttgacatcaccccatgcagttttggaggcgtgtctgtgatcacccctggcacaaacacctcaaaccaggtggctgtgctgtatcaaggtgtcaattgcaccgaggtgcctgtggcaatacatgctgaccagctcaccccaacctggcgagtgtactctacc

SEQ ID NO: 5 - protein, 684 aa, synthetic construct
  REGION 1..684: note = CTD_long_a-dimer
TLKSFTVEKGIYQTSNFRVQPTESIVRFPNITNLCPFGEVFNATRFASVYAWNRKRISNCVADYSVLYNSASFSTFKCYGVSPTKLNDLCFTNVYADSFVIRGDEVRQIAPGQTGKIADYNYKLPDDFTGCVIAWNSNNLDSKVGGNYNYLYRLFRKSNLKPFERDISTEIYQAGSTPCNGVEGFNCYFPLQSYGFQPTNGVGYQPYRVVVLSFELLHAPATVCGPKKSTNLVKNKCVNFNFNGLTGTGVLTESNKKFLPFQQFGRDIADTTDAVRDPQTLEILDITPCSFGGVSVITPGTNTSNQVAVLYQDVNCTEVPVAIHADQLTPTWRVYSTGGGGSGGGGSTLKSFTVEKGIYQTSNFRVQPTESIVRFPNITNLCPFGEVFNATRFASVYAWNRKRISNCVADYSVLYNSASFSTFKCYGVSPTKLNDLCFTNVYADSFVIRGDEVRQIAPGQTGKIADYNYKLPDDFTGCVIAWNSNNLDSKVGGNYNYLYRLFRKSNLKPFERDISTEIYQAGSTPCNGVEGFNCYFPLQSYGFQPTNGVGYQPYRVVVLSFELLHAPATVCGPKKSTNLVKNKCVNFNFNGLTGTGVLTESNKKFLPFQQFGRDIADTTDAVRDPQTLEILDITPCSFGGVSVITPGTNTSNQVAVLYQDVNCTEVPVAIHADQLTPTWRVYST

SEQ ID NO: 6 - DNA, 2052 bp, synthetic construct
  misc_feature 1..2052: note = CTD_long_a-dimer
  source 1..2052: mol_type = other DNA
accctcaagtctttcactgtggagaaagggatctatcaaaccagcaattttagggttcagcccaccgaatcaatagtacggttcccaaatatcactaatctttgccccttcggggaagtatttaacgctactcgatttgctagcgtatatgcctggaaccggaagagaataagcaactgtgttgcagactatagcgtgctttacaattccgcatcctttagtaccttcaaatgttacggtgtgagccccaccaaactcaatgatctctgtttcacaaacgtgtacgcagatagtttcgttatacgcggggacgaagtacggcagatagcccctggccagacaggaaagatagccgattacaactacaaacttccagacgattttacagggtgtgtgatcgcttggaattcaaataacctggactccaaagtgggaggcaactataattacctgtaccgactgttccgcaaaagcaacttgaaacctttcgagcgagatatatcaaccgaaatctaccaagctggttctacaccttgtaatggtgtggagggatttaactgctacttccctcttcagtcctatggatttcagcctacaaatggagtcgggtatcaaccctatagagtcgtggtgttgtcatttgaacttctccatgcacctgctactgtctgtggtccaaaaaagtccactaatcttgtaaaaaacaaatgcgtgaacttcaatttcaatggcctcaccggaacaggtgttttgacagaatctaacaaaaaattccttcccttccagcaattcgggagagatatcgctgacacaaccgacgccgtaagagatccccagactcttgagatccttgacatcaccccatgcagttttggaggcgtgtctgtgatcacccctggcacaaacacctcaaaccaggtggctgtgctgtatcaagatgtcaattgcaccgaggtgcctgtggcaatacatgctgaccagctcaccccaacctggcgagtgtactctaccggtggcggtggctccgggggcggaggttccaccctcaagtctttcactgtggagaaagggatctatcaaaccagcaattttagggttcagcccaccgaatcaatagtacggttcccaaatatcactaatctttgccccttcggggaagtatttaacgctactcgatttgctagcgtatatgcctggaaccggaagagaataagcaactgtgttgcagactatagcgtgctttacaattccgcatcctttagtaccttcaaatgttacggtgtgagccccaccaaactcaatgatctctgtttcacaaacgtgtacgcagatagtttcgttatacgcggggacgaagtacggcagatagcccctggccagacaggaaagatagccgattacaactacaaacttccagacgattttacagggtgtgtgatcgcttggaattcaaataacctggactccaaagtgggaggcaactataattacctgtaccgactgttccgcaaaagcaacttgaaacctttcgagcgagatatatcaaccgaaatctaccaagctggttctacaccttgtaatggtgtggagggatttaactgctacttccctcttcagtcctatggatttcagcctacaaatggagtcgggtatcaaccctatagagtcgtggtgttgtcatttgaacttctccatgcacctgctactgtctgtggtccaaaaaagtccactaatcttgtaaaaaacaaatgcgtgaacttcaatttcaatggcctcaccggaacaggtgttttgacagaatctaacaaaaaattccttcccttccagcaattcgggagagatatcgctgacacaaccgacgccgtaagagatccccagactcttgagatccttgacatcaccccatgcagttttggaggcgtgtctgtgatcacccctggcacaaacacctcaaaccaggtggctgtgctgtatcaagatgtcaattgcaccgaggtgcctgtggcaatacatgctgaccagctcaccccaacctggcgagtgtactctacc

SEQ ID NO: 7 - protein, 329 aa, synthetic construct
  REGION 1..329: note = CTD_long_b
KGIYQTSNFRVQPTESIVRFPNITNLCPFGEVFNATRFASVYAWNRKRISNCVADYSVLYNSASFSTFKCYGVSPTKLNDLCFTNVYADSFVIRGDEVRQIAPGQTGKIADYNYKLPDDFTGCVIAWNSNNLDSKVGGNYNYLYRLFRKSNLKPFERDISTEIYQAGSTPCNGVEGFNCYFPLQSYGFQPTNGVGYQPYRVVVLSFELLHAPATVCGPKKSTNLVKNKCVNFNFNGLTGTGVLTESNKKFLPFQQFGRDIADTTDAVRDPQTLEILDITPCSFGGVSVITPGTNTSNQVAVLYQDVNCTEVPVAIHADQLTPTWRVYST

SEQ ID NO: 8 - DNA, 987 bp, synthetic construct
  misc_feature 1..987: note = CTD_long_b
  source 1..987: mol_type = other DNA
aaagggatctatcaaaccagcaattttagggttcagcccaccgaatcaatagtacggttcccaaatatcactaatctttgccccttcggggaagtatttaacgctactcgatttgctagcgtatatgcctggaaccggaagagaataagcaactgtgttgcagactatagcgtgctttacaattccgcatcctttagtaccttcaaatgttacggtgtgagccccaccaaactcaatgatctctgtttcacaaacgtgtacgcagatagtttcgttatacgcggggacgaagtacggcagatagcccctggccagacaggaaagatagccgattacaactacaaacttccagacgattttacagggtgtgtgatcgcttggaattcaaataacctggactccaaagtgggaggcaactataattacctgtaccgactgttccgcaaaagcaacttgaaacctttcgagcgagatatatcaaccgaaatctaccaagctggttctacaccttgtaatggtgtggagggatttaactgctacttccctcttcagtcctatggatttcagcctacaaatggagtcgggtatcaaccctatagagtcgtggtgttgtcatttgaacttctccatgcacctgctactgtctgtggtccaaaaaagtccactaatcttgtaaaaaacaaatgcgtgaacttcaatttcaatggcctcaccggaacaggtgttttgacagaatctaacaaaaaattccttcccttccagcaattcgggagagatatcgctgacacaaccgacgccgtaagagatccccagactcttgagatccttgacatcaccccatgcagttttggaggcgtgtctgtgatcacccctggcacaaacacctcaaaccaggtggctgtgctgtatcaagatgtcaattgcaccgaggtgcctgtggcaatacatgctgaccagctcaccccaacctggcgagtgtactctacc

SEQ ID NO: 9 - protein, 325 aa, synthetic construct
  REGION 1..325: note = CTD_long_c
KGIYQTSNFRVQPTESIVRFPNITNLCPFGEVFNATRFASVYAWNRKRISNCVADYSVLYNSASFSTFKCYGVSPTKLNDLCFTNVYADSFVIRGDEVRQIAPGQTGKIADYNYKLPDDFTGCVIAWNSNNLDSKVGGNYNYLYRLFRKSNLKPFERDISTEIYQAGSTPCNGVEGFNCYFPLQSYGFQPTNGVGYQPYRVVVLSFELLHAPATVCGPKKSTNLVKNKCVNFNFNGLTGTGVLTESNKKFLPFQQFGRDIADTTDAVRDPQTLEILDITPCSFGGVSVITPGTNTSNQVAVLYQDVNCTEVPVAIHADQLTPTWR

SEQ ID NO: 10 - DNA, 975 bp, synthetic construct
  misc_feature 1..975: note = CTD_long_c
  source 1..975: mol_type = other DNA
aaagggatctatcaaaccagcaattttagggttcagcccaccgaatcaatagtacggttcccaaatatcactaatctttgccccttcggggaagtatttaacgctactcgatttgctagcgtatatgcctggaaccggaagagaataagcaactgtgttgcagactatagcgtgctttacaattccgcatcctttagtaccttcaaatgttacggtgtgagccccaccaaactcaatgatctctgtttcacaaacgtgtacgcagatagtttcgttatacgcggggacgaagtacggcagatagcccctggccagacaggaaagatagccgattacaactacaaacttccagacgattttacagggtgtgtgatcgcttggaattcaaataacctggactccaaagtgggaggcaactataattacctgtaccgactgttccgcaaaagcaacttgaaacctttcgagcgagatatatcaaccgaaatctaccaagctggttctacaccttgtaatggtgtggagggatttaactgctacttccctcttcagtcctatggatttcagcctacaaatggagtcgggtatcaaccctatagagtcgtggtgttgtcatttgaacttctccatgcacctgctactgtctgtggtccaaaaaagtccactaatcttgtaaaaaacaaatgcgtgaacttcaatttcaatggcctcaccggaacaggtgttttgacagaatctaacaaaaaattccttcccttccagcaattcgggagagatatcgctgacacaaccgacgccgtaagagatccccagactcttgagatccttgacatcaccccatgcagttttggaggcgtgtctgtgatcacccctggcacaaacacctcaaaccaggtggctgtgctgtatcaagatgtcaattgcaccgaggtgcctgtggcaatacatgctgaccagctcaccccaacctggcga

SEQ ID NO: 11 - protein, 310 aa, synthetic construct
  REGION 1..310: note = CTD_long_d
KGIYQTSNFRVQPTESIVRFPNITNLCPFGEVFNATRFASVYAWNRKRISNCVADYSVLYNSASFSTFKCYGVSPTKLNDLCFTNVYADSFVIRGDEVRQIAPGQTGKIADYNYKLPDDFTGCVIAWNSNNLDSKVGGNYNYLYRLFRKSNLKPFERDISTEIYQAGSTPCNGVEGFNCYFPLQSYGFQPTNGVGYQPYRVVVLSFELLHAPATVCGPKKSTNLVKNKCVNFNFNGLTGTGVLTESNKKFLPFQQFGRDIADTTDAVRDPQTLEILDITPCSFGGVSVITPGTNTSNQVAVLYQDVNCTE

SEQ ID NO: 12 - DNA, 930 bp, synthetic construct
  misc_feature 1..930: note = CTD_long_d
  source 1..930: mol_type = other DNA
aaagggatctatcaaaccagcaattttagggttcagcccaccgaatcaatagtacggttcccaaatatcactaatctttgccccttcggggaagtatttaacgctactcgatttgctagcgtatatgcctggaaccggaagagaataagcaactgtgttgcagactatagcgtgctttacaattccgcatcctttagtaccttcaaatgttacggtgtgagccccaccaaactcaatgatctctgtttcacaaacgtgtacgcagatagtttcgttatacgcggggacgaagtacggcagatagcccctggccagacaggaaagatagccgattacaactacaaacttccagacgattttacagggtgtgtgatcgcttggaattcaaataacctggactccaaagtgggaggcaactataattacctgtaccgactgttccgcaaaagcaacttgaaacctttcgagcgagatatatcaaccgaaatctaccaagctggttctacaccttgtaatggtgtggagggatttaactgctacttccctcttcagtcctatggatttcagcctacaaatggagtcgggtatcaaccctatagagtcgtggtgttgtcatttgaacttctccatgcacctgctactgtctgtggtccaaaaaagtccactaatcttgtaaaaaacaaatgcgtgaacttcaatttcaatggcctcaccggaacaggtgttttgacagaatctaacaaaaaattccttcccttccagcaattcgggagagatatcgctgacacaaccgacgccgtaagagatccccagactcttgagatccttgacatcaccccatgcagttttggaggcgtgtctgtgatcacccctggcacaaacacctcaaaccaggtggctgtgctgtatcaagatgtcaattgcaccgag

SEQ ID NO: 13 - protein, 298 aa, synthetic construct
  REGION 1..298: note = CTD_long_e
KGIYQTSNFRVQPTESIVRFPNITNLCPFGEVFNATRFASVYAWNRKRISNCVADYSVLYNSASFSTFKCYGVSPTKLNDLCFTNVYADSFVIRGDEVRQIAPGQTGKIADYNYKLPDDFTGCVIAWNSNNLDSKVGGNYNYLYRLFRKSNLKPFERDISTEIYQAGSTPCNGVEGFNCYFPLQSYGFQPTNGVGYQPYRVVVLSFELLHAPATVCGPKKSTNLVKNKCVNFNFNGLTGTGVLTESNKKFLPFQQFGRDIADTTDAVRDPQTLEILDITPCSFGGVSVITPGTNTSNQ

SEQ ID NO: 14 - DNA, 894 bp, synthetic construct
  misc_feature 1..894: note = CTD_long_e
  source 1..894: mol_type = other DNA
aaagggatctatcaaaccagcaattttagggttcagcccaccgaatcaatagtacggttcccaaatatcactaatctttgccccttcggggaagtatttaacgctactcgatttgctagcgtatatgcctggaaccggaagagaataagcaactgtgttgcagactatagcgtgctttacaattccgcatcctttagtaccttcaaatgttacggtgtgagccccaccaaactcaatgatctctgtttcacaaacgtgtacgcagatagtttcgttatacgcggggacgaagtacggcagatagcccctggccagacaggaaagatagccgattacaactacaaacttccagacgattttacagggtgtgtgatcgcttggaattcaaataacctggactccaaagtgggaggcaactataattacctgtaccgactgttccgcaaaagcaacttgaaacctttcgagcgagatatatcaaccgaaatctaccaagctggttctacaccttgtaatggtgtggagggatttaactgctacttccctcttcagtcctatggatttcagcctacaaatggagtcgggtatcaaccctatagagtcgtggtgttgtcatttgaacttctccatgcacctgctactgtctgtggtccaaaaaagtccactaatcttgtaaaaaacaaatgcgtgaacttcaatttcaatggcctcaccggaacaggtgttttgacagaatctaacaaaaaattccttcccttccagcaattcgggagagatatcgctgacacaaccgacgccgtaagagatccccagactcttgagatccttgacatcaccccatgcagttttggaggcgtgtctgtgatcacccctggcacaaacacctcaaaccag

SEQ ID NO: 15 - protein, 293 aa, synthetic construct
  REGION 1..293: note = CTD_long_f
KGIYQTSNFRVQPTESIVRFPNITNLCPFGEVFNATRFASVYAWNRKRISNCVADYSVLYNSASFSTFKCYGVSPTKLNDLCFTNVYADSFVIRGDEVRQIAPGQTGKIADYNYKLPDDFTGCVIAWNSNNLDSKVGGNYNYLYRLFRKSNLKPFERDISTEIYQAGSTPCNGVEGFNCYFPLQSYGFQPTNGVGYQPYRVVVLSFELLHAPATVCGPKKSTNLVKNKCVNFNFNGLTGTGVLTESNKKFLPFQQFGRDIADTTDAVRDPQTLEILDITPCSFGGVSVITPGT

SEQ ID NO: 16 - DNA, 879 bp, synthetic construct
  misc_feature 1..879: note = CTD_long_f
  source 1..879: mol_type = other DNA
aaagggatctatcaaaccagcaattttagggttcagcccaccgaatcaatagtacggttcccaaatatcactaatctttgccccttcggggaagtatttaacgctactcgatttgctagcgtatatgcctggaaccggaagagaataagcaactgtgttgcagactatagcgtgctttacaattccgcatcctttagtaccttcaaatgttacggtgtgagccccaccaaactcaatgatctctgtttcacaaacgtgtacgcagatagtttcgttatacgcggggacgaagtacggcagatagcccctggccagacaggaaagatagccgattacaactacaaacttccagacgattttacagggtgtgtgatcgcttggaattcaaataacctggactccaaagtgggaggcaactataattacctgtaccgactgttccgcaaaagcaacttgaaacctttcgagcgagatatatcaaccgaaatctaccaagctggttctacaccttgtaatggtgtggagggatttaactgctacttccctcttcagtcctatggatttcagcctacaaatggagtcgggtatcaaccctatagagtcgtggtgttgtcatttgaacttctccatgcacctgctactgtctgtggtccaaaaaagtccactaatcttgtaaaaaacaaatgcgtgaacttcaatttcaatggcctcaccggaacaggtgttttgacagaatctaacaaaaaattccttcccttccagcaattcgggagagatatcgctgacacaaccgacgccgtaagagatccccagactcttgagatccttgacatcaccccatgcagttttggaggcgtgtctgtgatcacccctggcaca

SEQ ID NO: 17 - protein, 315 aa, synthetic construct
  REGION 1..315: note = CTD_long_g
SFTVEKGIYQTSNFRVQPTESIVRFPNITNLCPFGEVFNATRFASVYAWNRKRISNCVADYSVLYNSASFSTFKCYGVSPTKLNDLCFTNVYADSFVIRGDEVRQIAPGQTGKIADYNYKLPDDFTGCVIAWNSNNLDSKVGGNYNYLYRLFRKSNLKPFERDISTEIYQAGSTPCNGVEGFNCYFPLQSYGFQPTNGVGYQPYRVVVLSFELLHAPATVCGPKKSTNLVKNKCVNFNFNGLTGTGVLTESNKKFLPFQQFGRDIADTTDAVRDPQTLEILDITPCSFGGVSVITPGTNTSNQVAVLYQDVNCTE

SEQ ID NO: 18 - DNA, 945 bp, synthetic construct
  misc_feature 1..945: note = CTD_long_g
  source 1..945: mol_type = other DNA
tctttcactgtggagaaagggatctatcaaaccagcaattttagggttcagcccaccgaatcaatagtacggttcccaaatatcactaatctttgccccttcggggaagtatttaacgctactcgatttgctagcgtatatgcctggaaccggaagagaataagcaactgtgttgcagactatagcgtgctttacaattccgcatcctttagtaccttcaaatgttacggtgtgagccccaccaaactcaatgatctctgtttcacaaacgtgtacgcagatagtttcgttatacgcggggacgaagtacggcagatagcccctggccagacaggaaagatagccgattacaactacaaacttccagacgattttacagggtgtgtgatcgcttggaattcaaataacctggactccaaagtgggaggcaactataattacctgtaccgactgttccgcaaaagcaacttgaaacctttcgagcgagatatatcaaccgaaatctaccaagctggttctacaccttgtaatggtgtggagggatttaactgctacttccctcttcagtcctatggatttcagcctacaaatggagtcgggtatcaaccctatagagtcgtggtgttgtcatttgaacttctccatgcacctgctactgtctgtggtccaaaaaagtccactaatcttgtaaaaaacaaatgcgtgaacttcaatttcaatggcctcaccggaacaggtgttttgacagaatctaacaaaaaattccttcccttccagcaattcgggagagatatcgctgacacaaccgacgccgtaagagatccccagactcttgagatccttgacatcaccccatgcagttttggaggcgtgtctgtgatcacccctggcacaaacacctcaaaccaggtggctgtgctgtatcaagatgtcaattgcaccgag

SEQ ID NO: 19 - protein, 303 aa, synthetic construct
  REGION 1..303: note = CTD_long_h
SFTVEKGIYQTSNFRVQPTESIVRFPNITNLCPFGEVFNATRFASVYAWNRKRISNCVADYSVLYNSASFSTFKCYGVSPTKLNDLCFTNVYADSFVIRGDEVRQIAPGQTGKIADYNYKLPDDFTGCVIAWNSNNLDSKVGGNYNYLYRLFRKSNLKPFERDISTEIYQAGSTPCNGVEGFNCYFPLQSYGFQPTNGVGYQPYRVVVLSFELLHAPATVCGPKKSTNLVKNKCVNFNFNGLTGTGVLTESNKKFLPFQQFGRDIADTTDAVRDPQTLEILDITPCSFGGVSVITPGTNTSNQ

SEQ ID NO: 20 - DNA, 909 bp, synthetic construct
  misc_feature 1..909: note = CTD_long_h
  source 1..909: mol_type = other DNA
tctttcactgtggagaaagggatctatcaaaccagcaattttagggttcagcccaccgaatcaatagtacggttcccaaatatcactaatctttgccccttcggggaagtatttaacgctactcgatttgctagcgtatatgcctggaaccggaagagaataagcaactgtgttgcagactatagcgtgctttacaattccgcatcctttagtaccttcaaatgttacggtgtgagccccaccaaactcaatgatctctgtttcacaaacgtgtacgcagatagtttcgttatacgcggggacgaagtacggcagatagcccctggccagacaggaaagatagccgattacaactacaaacttccagacgattttacagggtgtgtgatcgcttggaattcaaataacctggactccaaagtgggaggcaactataattacctgtaccgactgttccgcaaaagcaacttgaaacctttcgagcgagatatatcaaccgaaatctaccaagctggttctacaccttgtaatggtgtggagggatttaactgctacttccctcttcagtcctatggatttcagcctacaaatggagtcgggtatcaaccctatagagtcgtggtgttgtcatttgaacttctccatgcacctgctactgtctgtggtccaaaaaagtccactaatcttgtaaaaaacaaatgcgtgaacttcaatttcaatggcctcaccggaacaggtgttttgacagaatctaacaaaaaattccttcccttccagcaattcgggagagatatcgctgacacaaccgacgccgtaagagatccccagactcttgagatccttgacatcaccccatgcagttttggaggcgtgtctgtgatcacccctggcacaaacacctcaaaccag

SEQ ID NO: 21 - protein, 298 aa, synthetic construct
  REGION 1..298: note = CTD_long_i
SFTVEKGIYQTSNFRVQPTESIVRFPNITNLCPFGEVFNATRFASVYAWNRKRISNCVADYSVLYNSASFSTFKCYGVSPTKLNDLCFTNVYADSFVIRGDEVRQIAPGQTGKIADYNYKLPDDFTGCVIAWNSNNLDSKVGGNYNYLYRLFRKSNLKPFERDISTEIYQAGSTPCNGVEGFNCYFPLQSYGFQPTNGVGYQPYRVVVLSFELLHAPATVCGPKKSTNLVKNKCVNFNFNGLTGTGVLTESNKKFLPFQQFGRDIADTTDAVRDPQTLEILDITPCSFGGVSVITPGT

SEQ ID NO: 22 - DNA, 894 bp, synthetic construct
  misc_feature 1..894: note = CTD_long_i
  source 1..894: mol_type = other DNA
tctttcactgtggagaaagggatctatcaaaccagcaattttagggttcagcccaccgaatcaatagtacggttcccaaatatcactaatctttgccccttcggggaagtatttaacgctactcgatttgctagcgtatatgcctggaaccggaagagaataagcaactgtgttgcagactatagcgtgctttacaattccgcatcctttagtaccttcaaatgttacggtgtgagccccaccaaactcaatgatctctgtttcacaaacgtgtacgcagatagtttcgttatacgcggggacgaagtacggcagatagcccctggccagacaggaaagatagccgattacaactacaaacttccagacgattttacagggtgtgtgatcgcttggaattcaaataacctggactccaaagtgggaggcaactataattacctgtaccgactgttccgcaaaagcaacttgaaacctttcgagcgagatatatcaaccgaaatctaccaagctggttctacaccttgtaatggtgtggagggatttaactgctacttccctcttcagtcctatggatttcagcctacaaatggagtcgggtatcaaccctatagagtcgtggtgttgtcatttgaacttctccatgcacctgctactgtctgtggtccaaaaaagtccactaatcttgtaaaaaacaaatgcgtgaacttcaatttcaatggcctcaccggaacaggtgttttgacagaatctaacaaaaaattccttcccttccagcaattcgggagagatatcgctgacacaaccgacgccgtaagagatccccagactcttgagatccttgacatcaccccatgcagttttggaggcgtgtctgtgatcacccctggcaca

SEQ ID NO: 23 - protein, 273 aa, synthetic construct
  REGION 1..273: note = CTD_short_a
RVQPTESIVRFPNITNLCPFGEVFNATRFASVYAWNRKRISNCVADYSVLYNSASFSTFKCYGVSPTKLNDLCFTNVYADSFVIRGDEVRQIAPGQTGKIADYNYKLPDDFTGCVIAWNSNNLDSKVGGNYNYLYRLFRKSNLKPFERDISTEIYQAGSTPCNGVEGFNCYFPLQSYGFQPTNGVGYQPYRVVVLSFELLHAPATVCGPKKSTNLVKNKCVNFNFNGLTGTGVLTESNKKFLPFQQFGRDIADTTDAVRDPQTLEILDITPCS

SEQ ID NO: 24 - DNA, 819 bp, synthetic construct
  misc_feature 1..819: note = CTD_short_a
  source 1..819: mol_type = other DNA
agggttcagcccaccgaatcaatagtacggttcccaaatatcactaatctttgccccttcggggaagtatttaacgctactcgatttgctagcgtatatgcctggaaccggaagagaataagcaactgtgttgcagactatagcgtgctttacaattccgcatcctttagtaccttcaaatgttacggtgtgagccccaccaaactcaatgatctctgtttcacaaacgtgtacgcagatagtttcgttatacgcggggacgaagtacggcagatagcccctggccagacaggaaagatagccgattacaactacaaacttccagacgattttacagggtgtgtgatcgcttggaattcaaataacctggactccaaagtgggaggcaactataattacctgtaccgactgttccgcaaaagcaacttgaaacctttcgagcgagatatatcaaccgaaatctaccaagctggttctacaccttgtaatggtgtggagggatttaactgctacttccctcttcagtcctatggatttcagcctacaaatggagtcgggtatcaaccctatagagtcgtggtgttgtcatttgaacttctccatgcacctgctactgtctgtggtccaaaaaagtccactaatcttgtaaaaaacaaatgcgtgaacttcaatttcaatggcctcaccggaacaggtgttttgacagaatctaacaaaaaattccttcccttccagcaattcgggagagatatcgctgacacaaccgacgccgtaagagatccccagactcttgagatccttgacatcaccccatgcagt

SEQ ID NO: 25 - protein, 261 aa, synthetic construct
  REGION 1..261: note = CTD_short_b
NITNLCPFGEVFNATRFASVYAWNRKRISNCVADYSVLYNSASFSTFKCYGVSPTKLNDLCFTNVYADSFVIRGDEVRQIAPGQTGKIADYNYKLPDDFTGCVIAWNSNNLDSKVGGNYNYLYRLFRKSNLKPFERDISTEIYQAGSTPCNGVEGFNCYFPLQSYGFQPTNGVGYQPYRVVVLSFELLHAPATVCGPKKSTNLVKNKCVNFNFNGLTGTGVLTESNKKFLPFQQFGRDIADTTDAVRDPQTLEILDITPCS

SEQ ID NO: 26 - DNA, 783 bp, synthetic construct
  misc_feature 1..783: note = CTD_short_b
  source 1..783: mol_type = other DNA
aatatcactaatctttgccccttcggggaagtatttaacgctactcgatttgctagcgtatatgcctggaaccggaagagaataagcaactgtgttgcagactatagcgtgctttacaattccgcatcctttagtaccttcaaatgttacggtgtgagccccaccaaactcaatgatctctgtttcacaaacgtgtacgcagatagtttcgttatacgcggggacgaagtacggcagatagcccctggccagacaggaaagatagccgattacaactacaaacttccagacgattttacagggtgtgtgatcgcttggaattcaaataacctggactccaaagtgggaggcaactataattacctgtaccgactgttccgcaaaagcaacttgaaacctttcgagcgagatatatcaaccgaaatctaccaagctggttctacaccttgtaatggtgtggagggatttaactgctacttccctcttcagtcctatggatttcagcctacaaatggagtcgggtatcaaccctatagagtcgtggtgttgtcatttgaacttctccatgcacctgctactgtctgtggtccaaaaaagtccactaatcttgtaaaaaacaaatgcgtgaacttcaatttcaatggcctcaccggaacaggtgttttgacagaatctaacaaaaaattccttcccttccagcaattcgggagagatatcgctgacacaaccgacgccgtaagagatccccagactcttgagatccttgacatcaccccatgcagt

SEQ ID NO: 27 - protein, 248 aa, synthetic construct
  REGION 1..248: note = CTD_short_c
NITNLCPFGEVFNATRFASVYAWNRKRISNCVADYSVLYNSASFSTFKCYGVSPTKLNDLCFTNVYADSFVIRGDEVRQIAPGQTGKIADYNYKLPDDFTGCVIAWNSNNLDSKVGGNYNYLYRLFRKSNLKPFERDISTEIYQAGSTPCNGVEGFNCYFPLQSYGFQPTNGVGYQPYRVVVLSFELLHAPATVCGPKKSTNLVKNKCVNFNFNGLTGTGVLTESNKKFLPFQQFGRDIADTTDAVRD

SEQ ID NO: 28 - DNA, 744 bp, synthetic construct
  misc_feature 1..744: note = CTD_short_c
  source 1..744: mol_type = other DNA
aatatcactaatctttgccccttcggggaagtatttaacgctactcgatttgctagcgtatatgcctggaaccggaagagaataagcaactgtgttgcagactatagcgtgctttacaattccgcatcctttagtaccttcaaatgttacggtgtgagccccaccaaactcaatgatctctgtttcacaaacgtgtacgcagatagtttcgttatacgcggggacgaagtacggcagatagcccctggccagacaggaaagatagccgattacaactacaaacttccagacgattttacagggtgtgtgatcgcttggaattcaaataacctggactccaaagtgggaggcaactataattacctgtaccgactgttccgcaaaagcaacttgaaacctttcgagcgagatatatcaaccgaaatctaccaagctggttctacaccttgtaatggtgtggagggatttaactgctacttccctcttcagtcctatggatttcagcctacaaatggagtcgggtatcaaccctatagagtcgtggtgttgtcatttgaacttctccatgcacctgctactgtctgtggtccaaaaaagtccactaatcttgtaaaaaacaaatgcgtgaacttcaatttcaatggcctcaccggaacaggtgttttgacagaatctaacaaaaaattccttcccttccagcaattcgggagagatatcgctgacacaaccgacgccgtaagagat

SEQ ID NO: 29 - protein, 238 aa, synthetic construct
  REGION 1..238: note = CTD_short_d
NITNLCPFGEVFNATRFASVYAWNRKRISNCVADYSVLYNSASFSTFKCYGVSPTKLNDLCFTNVYADSFVIRGDEVRQIAPGQTGKIADYNYKLPDDFTGCVIAWNSNNLDSKVGGNYNYLYRLFRKSNLKPFERDISTEIYQAGSTPCNGVEGFNCYFPLQSYGFQPTNGVGYQPYRVVVLSFELLHAPATVCGPKKSTNLVKNKCVNFNFNGLTGTGVLTESNKKFLPFQQFGRD

SEQ ID NO: 30 - DNA, 714 bp, synthetic construct
  misc_feature 1..714: note = CTD_short_d
  source 1..714: mol_type = other DNA
aatatcactaatctttgccccttcggggaagtatttaacgctactcgatttgctagcgtatatgcctggaaccggaagagaataagcaactgtgttgcagactatagcgtgctttacaattccgcatcctttagtaccttcaaatgttacggtgtgagccccaccaaactcaatgatctctgtttcacaaacgtgtacgcagatagtttcgttatacgcggggacgaagtacggcagatagcccctggccagacaggaaagatagccgattacaactacaaacttccagacgattttacagggtgtgtgatcgcttggaattcaaataacctggactccaaagtgggaggcaactataattacctgtaccgactgttccgcaaaagcaacttgaaacctttcgagcgagatatatcaaccgaaatctaccaagctggttctacaccttgtaatggtgtggagggatttaactgctacttccctcttcagtcctatggatttcagcctacaaatggagtcgggtatcaaccctatagagtcgtggtgttgtcatttgaacttctccatgcacctgctactgtctgtggtccaaaaaagtccactaatcttgtaaaaaacaaatgcgtgaacttcaatttcaatggcctcaccggaacaggtgttttgacagaatctaacaaaaaattccttcccttccagcaattcgggagagat

SEQ ID NO: 31 - protein, 225 aa, synthetic construct
  REGION 1..225: note = CTD_short_e
NITNLCPFGEVFNATRFASVYAWNRKRISNCVADYSVLYNSASFSTFKCYGVSPTKLNDLCFTNVYADSFVIRGDEVRQIAPGQTGKIADYNYKLPDDFTGCVIAWNSNNLDSKVGGNYNYLYRLFRKSNLKPFERDISTEIYQAGSTPCNGVEGFNCYFPLQSYGFQPTNGVGYQPYRVVVLSFELLHAPATVCGPKKSTNLVKNKCVNFNFNGLTGTGVLTES

SEQ ID NO: 32 - DNA, 675 bp, synthetic construct
  misc_feature 1..675: note = CTD_short_e
  source 1..675: mol_type = other DNA
aatatcactaatctttgccccttcggggaagtatttaacgctactcgatttgctagcgtatatgcctggaaccggaagagaataagcaactgtgttgcagactatagcgtgctttacaattccgcatcctttagtaccttcaaatgttacggtgtgagccccaccaaactcaatgatctctgtttcacaaacgtgtacgcagatagtttcgttatacgcggggacgaagtacggcagatagcccctggccagacaggaaagatagccgattacaactacaaacttccagacgattttacagggtgtgtgatcgcttggaattcaaataacctggactccaaagtgggaggcaactataattacctgtaccgactgttccgcaaaagcaacttgaaacctttcgagcgagatatatcaaccgaaatctaccaagctggttctacaccttgtaatggtgtggagggatttaactgctacttccctcttcagtcctatggatttcagcctacaaatggagtcgggtatcaaccctatagagtcgtggtgttgtcatttgaacttctccatgcacctgctactgtctgtggtccaaaaaagtccactaatcttgtaaaaaacaaatgcgtgaacttcaatttcaatggcctcaccggaacaggtgttttgacagaatct

SEQ ID NO: 33 - protein, 260 aa, synthetic construct
  REGION 1..260: note = CTD_short_f
RVQPTESIVRFPNITNLCPFGEVFNATRFASVYAWNRKRISNCVADYSVLYNSASFSTFKCYGVSPTKLNDLCFTNVYADSFVIRGDEVRQIAPGQTGKIADYNYKLPDDFTGCVIAWNSNNLDSKVGGNYNYLYRLFRKSNLKPFERDISTEIYQAGSTPCNGVEGFNCYFPLQSYGFQPTNGVGYQPYRVVVLSFELLHAPATVCGPKKSTNLVKNKCVNFNFNGLTGTGVLTESNKKFLPFQQFGRDIADTTDAVRD

SEQ ID NO: 34 - DNA, 780 bp, synthetic construct
  misc_feature 1..780: note = CTD_short_f
  source 1..780: mol_type = other DNA
agggttcagcccaccgaatcaatagtacggttcccaaatatcactaatctttgccccttcggggaagtatttaacgctactcgatttgctagcgtatatgcctggaaccggaagagaataagcaactgtgttgcagactatagcgtgctttacaattccgcatcctttagtaccttcaaatgttacggtgtgagccccaccaaactcaatgatctctgtttcacaaacgtgtacgcagatagtttcgttatacgcggggacgaagtacggcagatagcccctggccagacaggaaagatagccgattacaactacaaacttccagacgattttacagggtgtgtgatcgcttggaattcaaataacctggactccaaagtgggaggcaactataattacctgtaccgactgttccgcaaaagcaacttgaaacctttcgagcgagatatatcaaccgaaatctaccaagctggttctacaccttgtaatggtgtggagggatttaactgctacttccctcttcagtcctatggatttcagcctacaaatggagtcgggtatcaaccctatagagtcgtggtgttgtcatttgaacttctccatgcacctgctactgtctgtggtccaaaaaagtccactaatcttgtaaaaaacaaatgcgtgaacttcaatttcaatggcctcaccggaacaggtgttttgacagaatctaacaaaaaattccttcccttccagcaattcgggagagatatcgctgacacaaccgacgccgtaagagat

SEQ ID NO: 35 - protein, 250 aa, synthetic construct
  REGION 1..250: note = CTD_short_g
RVQPTESIVRFPNITNLCPFGEVFNATRFASVYAWNRKRISNCVADYSVLYNSASFSTFKCYGVSPTKLNDLCFTNVYADSFVIRGDEVRQIAPGQTGKIADYNYKLPDDFTGCVIAWNSNNLDSKVGGNYNYLYRLFRKSNLKPFERDISTEIYQAGSTPCNGVEGFNCYFPLQSYGFQPTNGVGYQPYRVVVLSFELLHAPATVCGPKKSTNLVKNKCVNFNFNGLTGTGVLTESNKKFLPFQQFGRD

SEQ ID NO: 36 - DNA, 750 bp, synthetic construct
  misc_feature 1..750: note = CTD_short_g
  source 1..750: mol_type = other DNA
agggttcagcccaccgaatcaatagtacggttcccaaatatcactaatctttgccccttcggggaagtatttaacgctactcgatttgctagcgtatatgcctggaaccggaagagaataagcaactgtgttgcagactatagcgtgctttacaattccgcatcctttagtaccttcaaatgttacggtgtgagccccaccaaactcaatgatctctgtttcacaaacgtgtacgcagatagtttcgttatacgcggggacgaagtacggcagatagcccctggccagacaggaaagatagccgattacaactacaaacttccagacgattttacagggtgtgtgatcgcttggaattcaaataacctggactccaaagtgggaggcaactataattacctgtaccgactgttccgcaaaagcaacttgaaacctttcgagcgagatatatcaaccgaaatctaccaagctggttctacaccttgtaatggtgtggagggatttaactgctacttccctcttcagtcctatggatttcagcctacaaatggagtcgggtatcaaccctatagagtcgtggtgttgtcatttgaacttctccatgcacctgctactgtctgtggtccaaaaaagtccactaatcttgtaaaaaacaaatgcgtgaacttcaatttcaatggcctcaccggaacaggtgttttgacagaatctaacaaaaaattccttcccttccagcaattcgggagagat

SEQ ID NO: 37 - protein, 237 aa, synthetic construct
  REGION 1..237: note = CTD_short_h
RVQPTESIVRFPNITNLCPFGEVFNATRFASVYAWNRKRISNCVADYSVLYNSASFSTFKCYGVSPTKLNDLCFTNVYADSFVIRGDEVRQIAPGQTGKIADYNYKLPDDFTGCVIAWNSNNLDSKVGGNYNYLYRLFRKSNLKPFERDISTEIYQAGSTPCNGVEGFNCYFPLQSYGFQPTNGVGYQPYRVVVLSFELLHAPATVCGPKKSTNLVKNKCVNFNFNGLTGTGVLTES

SEQ ID NO: 38 - DNA, 711 bp, synthetic construct
  misc_feature 1..711: note = CTD_short_h
  source 1..711: mol_type = other DNA
agggttcagcccaccgaatcaatagtacggttcccaaatatcactaatctttgccccttcggggaagtatttaacgctactcgatttgctagcgtatatgcctggaaccggaagagaataagcaactgtgttgcagactatagcgtgctttacaattccgcatcctttagtaccttcaaatgttacggtgtgagccccaccaaactcaatgatctctgtttcacaaacgtgtacgcagatagtttcgttatacgcggggacgaagtacggcagatagcccctggccagacaggaaagatagccgattacaactacaaacttccagacgattttacagggtgtgtgatcgcttggaattcaaataacctggactccaaagtgggaggcaactataattacctgtaccgactgttccgcaaaagcaacttgaaacctttcgagcgagatatatcaaccgaaatctaccaagctggttctacaccttgtaatggtgtggagggatttaactgctacttccctcttcagtcctatggatttcagcctacaaatggagtcgggtatcaaccctatagagtcgtggtgttgtcatttgaacttctccatgcacctgctactgtctgtggtccaaaaaagtccactaatcttgtaaaaaacaaatgcgtgaacttcaatttcaatggcctcaccggaacaggtgttttgacagaatct

SEQ ID NO: 39 - protein, 207 aa, synthetic construct
  REGION 1..207: note = CTD_short_i
NITNLCPFGEVFNATRFASVYAWNRKRISNCVADYSVLYNSASFSTFKCYGVSPTKLNDLCFTNVYADSFVIRGDEVRQIAPGQTGKIADYNYKLPDDFTGCVIAWNSNNLDSKVGGNYNYLYRLFRKSNLKPFERDISTEIYQAGSTPCNGVEGFNCYFPLQSYGFQPTNGVGYQPYRVVVLSFELLHAPATVCGPKKSTNLVKNK

SEQ ID NO: 40 - DNA, 621 bp, synthetic construct
  misc_feature 1..621: note = CTD_short_i
  source 1..621: mol_type = other DNA
aatatcactaatctttgccccttcggggaagtatttaacgctactcgatttgctagcgtatatgcctggaaccggaagagaataagcaactgtgttgcagactatagcgtgctttacaattccgcatcctttagtaccttcaaatgttacggtgtgagccccaccaaactcaatgatctctgtttcacaaacgtgtacgcagatagtttcgttatacgcggggacgaagtacggcagatagcccctggccagacaggaaagatagccgattacaactacaaacttccagacgattttacagggtgtgtgatcgcttggaattcaaataacctggactccaaagtgggaggcaactataattacctgtaccgactgttccgcaaaagcaacttgaaacctttcgagcgagatatatcaaccgaaatctaccaagctggttctacaccttgtaatggtgtggagggatttaactgctacttccctcttcagtcctatggatttcagcctacaaatggagtcgggtatcaaccctatagagtcgtggtgttgtcatttgaacttctccatgcacctgctactgtctgtggtccaaaaaagtccactaatcttgtaaaaaacaaa

SEQ ID NO: 41 - protein, 160 aa, synthetic construct
  REGION 1..160: note = CTD_veryshort_a
SASFSTFKCYGVSPTKLNDLCFTNVYADSFVIRGDEVRQIAPGQTGKIADYNYKLPDDFTGCVIAWNSNNLDSKVGGNYNYLYRLFRKSNLKPFERDISTEIYQAGSTPCNGVEGFNCYFPLQSYGFQPTNGVGYQPYRVVVLSFELLHAPATVCGPKKS

SEQ ID NO: 42 - DNA, 480 bp, synthetic construct
  misc_feature 1..480: note = CTD_veryshort_a
  source 1..480: mol_type = other DNA
tccgcatcctttagtaccttcaaatgttacggtgtgagccccaccaaactcaatgatctctgtttcacaaacgtgtacgcagatagtttcgttatacgcggggacgaagtacggcagatagcccctggccagacaggaaagatagccgattacaactacaaacttccagacgattttacagggtgtgtgatcgcttggaattcaaataacctggactccaaagtgggaggcaactataattacctgtaccgactgttccgcaaaagcaacttgaaacctttcgagcgagatatatcaaccgaaatctaccaagctggttctacaccttgtaatggtgtggagggatttaactgctacttccctcttcagtcctatggatttcagcctacaaatggagtcgggtatcaaccctatagagtcgtggtgttgtcatttgaacttctccatgcacctgctactgtctgtggtccaaaaaagtcc

SEQ ID NO: 43 - protein, 156 aa, synthetic construct
  REGION 1..156: note = CTD_veryshort_b
STFKCYGVSPTKLNDLCFTNVYADSFVIRGDEVRQIAPGQTGKIADYNYKLPDDFTGCVIAWNSNNLDSKVGGNYNYLYRLFRKSNLKPFERDISTEIYQAGSTPCNGVEGFNCYFPLQSYGFQPTNGVGYQPYRVVVLSFELLHAPATVCGPKKS

SEQ ID NO: 44 - DNA, 468 bp, synthetic construct
  misc_feature 1..468: note = CTD_veryshort_b
  source 1..468: mol_type = other DNA
agtaccttcaaatgttacggtgtgagccccaccaaactcaatgatctctgtttcacaaacgtgtacgcagatagtttcgttatacgcggggacgaagtacggcagatagcccctggccagacaggaaagatagccgattacaactacaaacttccagacgattttacagggtgtgtgatcgcttggaattcaaataacctggactccaaagtgggaggcaactataattacctgtaccgactgttccgcaaaagcaacttgaaacctttcgagcgagatatatcaaccgaaatctaccaagctggttctacaccttgtaatggtgtggagggatttaactgctacttccctcttcagtcctatggatttcagcctacaaatggagtcgggtatcaaccctatagagtcgtggtgttgtcatttgaacttctccatgcacctgctactgtctgtggtccaaaaaagtcc

SEQ ID NO: 45 - protein, 156 aa, synthetic construct
  REGION 1..156: note = CTD_veryshort_c
SASFSTFKCYGVSPTKLNDLCFTNVYADSFVIRGDEVRQIAPGQTGKIADYNYKLPDDFTGCVIAWNSNNLDSKVGGNYNYLYRLFRKSNLKPFERDISTEIYQAGSTPCNGVEGFNCYFPLQSYGFQPTNGVGYQPYRVVVLSFELLHAPATVCG

SEQ ID NO: 46 - DNA, 468 bp, synthetic construct
  misc_feature 1..468: note = CTD_veryshort_c
  source 1..468: mol_type = other DNA
tccgcatcctttagtaccttcaaatgttacggtgtgagccccaccaaactcaatgatctctgtttcacaaacgtgtacgcagatagtttcgttatacgcggggacgaagtacggcagatagcccctggccagacaggaaagatagccgattacaactacaaacttccagacgattttacagggtgtgtgatcgcttggaattcaaataacctggactccaaagtgggaggcaactataattacctgtaccgactgttccgcaaaagcaacttgaaacctttcgagcgagatatatcaaccgaaatctaccaagctggttctacaccttgtaatggtgtggagggatttaactgctacttccctcttcagtcctatggatttcagcctacaaatggagtcgggtatcaaccctatagagtcgtggtgttgtcatttgaacttctccatgcacctgctactgtctgtggt

SEQ ID NO: 47 - protein, 167 aa, synthetic construct
  REGION 1..167: note = CTD_veryshort_d
DYSVLYNSASFSTFKCYGVSPTKLNDLCFTNVYADSFVIRGDEVRQIAPGQTGKIADYNYKLPDDFTGCVIAWNSNNLDSKVGGNYNYLYRLFRKSNLKPFERDISTEIYQAGSTPCNGVEGFNCYFPLQSYGFQPTNGVGYQPYRVVVLSFELLHAPATVCGPKKS

SEQ ID NO: 48 - DNA, 501 bp, synthetic construct
  misc_feature 1..501: note = CTD_veryshort_d
  source 1..501: mol_type = other DNA
gactatagcgtgctttacaattccgcatcctttagtaccttcaaatgttacggtgtgagccccaccaaactcaatgatctctgtttcacaaacgtgtacgcagatagtttcgttatacgcggggacgaagtacggcagatagcccctggccagacaggaaagatagccgattacaactacaaacttccagacgattttacagggtgtgtgatcgcttggaattcaaataacctggactccaaagtgggaggcaactataattacctgtaccgactgttccgcaaaagcaacttgaaacctttcgagcgagatatatcaaccgaaatctaccaagctggttctacaccttgtaatggtgtggagggatttaactgctacttccctcttcagtcctatggatttcagcctacaaatggagtcgggtatcaaccctatagagtcgtggtgttgtcatttgaacttctccatgcacctgctactgtctgtggtccaaaaaagtcc

SEQ ID NO: 49 - protein, 163 aa, synthetic construct
  REGION 1..163: note = CTD_veryshort_e
DYSVLYNSASFSTFKCYGVSPTKLNDLCFTNVYADSFVIRGDEVRQIAPGQTGKIADYNYKLPDDFTGCVIAWNSNNLDSKVGGNYNYLYRLFRKSNLKPFERDISTEIYQAGSTPCNGVEGFNCYFPLQSYGFQPTNGVGYQPYRVVVLSFELLHAPATVCG

SEQ ID NO: 50 - DNA, 489 bp, synthetic construct
  misc_feature 1..489: note = CTD_veryshort_e
  source 1..489: mol_type = other DNA
gactatagcgtgctttacaattccgcatcctttagtaccttcaaatgttacggtgtgagccccaccaaactcaatgatctctgtttcacaaacgtgtacgcagatagtttcgttatacgcggggacgaagtacggcagatagcccctggccagacaggaaagatagccgattacaactacaaacttccagacgattttacagggtgtgtgatcgcttggaattcaaataacctggactccaaagtgggaggcaactataattacctgtaccgactgttccgcaaaagcaacttgaaacctttcgagcgagatatatcaaccgaaatctaccaagctggttctacaccttgtaatggtgtggagggatttaactgctacttccctcttcagtcctatggatttcagcctacaaatggagtcgggtatcaaccctatagagtcgtggtgttgtcatttgaacttctccatgcacctgctactgtctgtggt

SEQ ID NO: 51 - protein, 70 aa, synthetic construct
  REGION 1..70: note = RBD_a
NSNNLDSKVGGNYNYLYRLFRKSNLKPFERDISTEIYQAGSTPCNGVEGFNCYFPLQSYGFQPTNGVGYQ

SEQ ID NO: 52 - DNA, 210 bp, synthetic construct
  misc_feature 1..210: note = RBD_a
  source 1..210: mol_type = other DNA
aattcaaataacctggactccaaagtgggaggcaactataattacctgtaccgactgttccgcaaaagcaacttgaaacctttcgagcgagatatatcaaccgaaatctaccaagctggttctacaccttgtaatggtgtggagggatttaactgctacttccctcttcagtcctatggatttcagcctacaaatggagtcgggtatcaa

SEQ ID NO: 53 - protein, 122 aa, synthetic construct
  REGION 1..122: note = RBD_b
TKLNDLCFTNVYADSFVIRGDEVRQIAPGQTGKIADYNYKLPDDFTGCVIAWNSNNLDSKVGGNYNYLYRLFRKSNLKPFERDISTEIYQAGSTPCNGVEGFNCYFPLQSYGFQPTNGVGYQ

SEQ ID NO: 54 - DNA, 366 bp, synthetic construct
  misc_feature 1..366: note = RBD_b
  source 1..366: mol_type = other DNA
accaaactcaatgatctctgtttcacaaacgtgtacgcagatagtttcgttatacgcggggacgaagtacggcagatagcccctggccagacaggaaagatagccgattacaactacaaacttccagacgattttacagggtgtgtgatcgcttggaattcaaataacctggactccaaagtgggaggcaactataattacctgtaccgactgttccgcaaaagcaacttgaaacctttcgagcgagatatatcaaccgaaatctaccaagctggttctacaccttgtaatggtgtggagggatttaactgctacttccctcttcagtcctatggatttcagcctacaaatggagtcgggtatcaa

SEQ ID NO: 55 - protein, 80 aa, synthetic construct
  REGION 1..80: note = RBD_c
NSNNLDSKVGGNYNYLYRLFRKSNLKPFERDISTEIYQAGSTPCNGVEGFNCYFPLQSYGFQPTNGVGYQPYRVVVLSFE

SEQ ID NO: 56 - DNA, 240 bp, synthetic construct
  misc_feature 1..240: note = RBD_c
  source 1..240: mol_type = other DNA
aattcaaataacctggactccaaagtgggaggcaactataattacctgtaccgactgttccgcaaaagcaacttgaaacctttcgagcgagatatatcaaccgaaatctaccaagctggttctacaccttgtaatggtgtggagggatttaactgctacttccctcttcagtcctatggatttcagcctacaaatggagtcgggtatcaaccctatagagtcgtggtgttgtcatttgaa

SEQ ID NO: 57 - protein, 58 aa, synthetic construct
  REGION 1..58: note = RBD_d
GVSPTKLNDLCFTNVYADSFVIRGDEVRQIAPGQTGKIADYNYKLPDDFTGCVIAWNS

SEQ ID NO: 58 - DNA, 174 bp, synthetic construct
  misc_feature 1..174: note = RBD_d
  source 1..174: mol_type = other DNA
ggtgtgagccccaccaaactcaatgatctctgtttcacaaacgtgtacgcagatagtttcgttatacgcggggacgaagtacggcagatagcccctggccagacaggaaagatagccgattacaactacaaacttccagacgattttacagggtgtgtgatcgcttggaattca

SEQ ID NO: 59 - protein, 76 aa, synthetic construct
  REGION 1..76: note = RBD_e
IAWNSNNLDSKVGGNYNYLYRLFRKSNLKPFERDISTEIYQAGSTPCNGVEGFNCYFPLQSYGFQPTNGVGYQPYR

SEQ ID NO: 60 - DNA, 228 bp, synthetic construct
  misc_feature 1..228: note = RBD_e
  source 1..228: mol_type = other DNA
atcgcttggaattcaaataacctggactccaaagtgggaggcaactataattacctgtaccgactgttccgcaaaagcaacttgaaacctttcgagcgagatatatcaaccgaaatctaccaagctggttctacaccttgtaatggtgtggagggatttaactgctacttccctcttcagtcctatggatttcagcctacaaatggagtcgggtatcaaccctataga

SEQ ID NO: 61 - protein, 294 aa, synthetic construct
  REGION 1..294: note = NTD_long_a
VNLTTRTQLPPAYTNSFTRGVYYPDKVFRSSVLHSTQDLFLPFFSNVTWFHAIHVSGTNGTKRFDNPVLPFNDGVYFASTEKSNIIRGWIFGTTLDSKTQSLLIVNNATNVVIKVCEFQFCNDPFLGVYYHKNNKSWMESEFRVYSSANNCTFEYVSQPFLMDLEGKQGNFKNLREFVFKNIDGYFKIYSKHTPINLVRDLPQGFSALEPLVDLPIGINITRFQTLLALHRSYLTPGDSSSGWTAGAAAYYVGYLQPRTFLLKYNENGTITDAVDCALDPLSETKCTLKSFTVE

SEQ ID NO: 62 - DNA, 882 bp, synthetic construct
  misc_feature 1..882: note = NTD_long_a
  source 1..882: mol_type = other DNA
gtgaatcttactacacgtacacagctgccaccagcctataccaacagttttactcgtggtgtatactaccccgataaggtttttcgctcttccgtgctccatagtacacaggatctcttcctgccattcttcagtaatgtcacctggtttcatgctattcatgtgtctggaactaatggaaccaagcgctttgataatccagtactcccttttaatgacggagtttacttcgcaagcacagaaaagtccaatatcatacgcgggtggattttcggaactaccctcgactccaagactcaatcactccttatagtcaataacgccaccaatgtggtcatcaaagtctgtgaatttcaattttgcaacgacccattcctgggcgtctactatcataaaaacaataagagctggatggaatccgaatttagagtatacagttctgctaataattgcacattcgaatatgtatcccaacccttccttatggatttggagggcaagcaaggcaatttcaaaaacttgcgggaatttgtcttcaaaaacatagatgggtacttcaaaatttatagtaagcatacacctattaacttggttcgagacttgcctcagggcttcagcgcccttgaacctcttgtggatttgccaatcggcatcaatataacacgatttcagacactcttggcactgcatcgttcctacctgactccaggagactctagctctggttggacagcaggcgccgctgcttactatgtcggctacttgcaacctcgaacattccttctcaaatataacgaaaatggaactatcacagatgccgtggattgtgccttggaccctctctcagagactaagtgtaccctcaagtctttcactgtggag

SEQ ID NO: 63 - protein, 264 aa, synthetic construct
  REGION 1..264: note = NTD_short_a
RGVYYPDKVFRSSVLHSTQDLFLPFFSNVTWFHAIHVSGTNGTKRFDNPVLPFNDGVYFASTEKSNIIRGWIFGTTLDSKTQSLLIVNNATNVVIKVCEFQFCNDPFLGVYYHKNNKSWMESEFRVYSSANNCTFEYVSQPFLMDLEGKQGNFKNLREFVFKNIDGYFKIYSKHTPINLVRDLPQGFSALEPLVDLPIGINITRFQTLLALHRSYLTPGDSSSGWTAGAAAYYVGYLQPRTFLLKYNENGTITDAVDCALDPLS

SEQ ID NO: 64 - DNA, 792 bp, synthetic construct
  misc_feature 1..792: note = NTD_short_a
  source 1..792: mol_type = other DNA
cgtggtgtatactaccccgataaggtttttcgctcttccgtgctccatagtacacaggatctcttcctgccattcttcagtaatgtcacctggtttcatgctattcatgtgtctggaactaatggaaccaagcgctttgataatccagtactcccttttaatgacggagtttacttcgcaagcacagaaaagtccaatatcatacgcgggtggattttcggaactaccctcgactccaagactcaatcactccttatagtcaataacgccaccaatgtggtcatcaaagtctgtgaatttcaattttgcaacgacccattcctgggcgtctactatcataaaaacaataagagctggatggaatccgaatttagagtatacagttctgctaataattgcacattcgaatatgtatcccaacccttccttatggatttggagggcaagcaaggcaatttcaaaaacttgcgggaatttgtcttcaaaaacatagatgggtacttcaaaatttatagtaagcatacacctattaacttggttcgagacttgcctcagggcttcagcgcccttgaacctcttgtggatttgccaatcggcatcaatataacacgatttcagacactcttggcactgcatcgttcctacctgactccaggagactctagctctggttggacagcaggcgccgctgcttactatgtcggctacttgcaacctcgaacattccttctcaaatataacgaaaatggaactatcacagatgccgtggattgtgccttggaccctctctca

SEQ ID NO: 65 - protein, 13 aa, synthetic construct
  REGION 1..13: note = Fc1
GSGGGGDGGGGSG

SEQ ID NO: 66 - DNA, 39 bp, synthetic construct
  misc_feature 1..39: note = Fc1
  source 1..39: mol_type = other DNA
ggatccggcggcggcggtgacggtggtggcggctccgga

SEQ ID NO: 67 - protein, 19 aa, synthetic construct
  REGION 1..19: note = Fc1-TEV
GSGGGGENLYFQGGGGGSG

SEQ ID NO: 68 - DNA, 57 bp, synthetic construct
  misc_feature 1..57: note = Fc1-TEV
  source 1..57: mol_type = other DNA
ggatccggcggcggcggtgagaacctgtacttccaaggaggtggtggcggctccgga

SEQ ID NO: 69 - protein, 20 aa, synthetic construct
  REGION 1..20: note = Fc1-Rv3C
GSGGGGLEVLFQGPGGGGSG

SEQ ID NO: 70 - DNA, 60 bp, synthetic construct
  misc_feature 1..60: note = Fc1-Rv3C
  source 1..60: mol_type = other DNA
ggatccggcggcggcggtctggaggtgctgttccagggacccggtggtggcggctccgga

SEQ ID NO: 71 - protein, 227 aa, synthetic construct
  REGION 1..227: note = Human IgG1
DKTHTCPPCPAPELLGGPSVFLFPPKPKDTLMISRTPEVTCVVVDVSHEDPEVKFNWYVDGVEVHNAKTKPREEQYNSTYRVVSVLTVLHQDWLNGKEYKCKVSNKALPAPIEKTISKAKGQPREPQVYTLPPSREELTKNQVSLTCLVKGFYPSDIAVEWESNGQPENNYKTTPPVLDSDGSFFLYSKLTVDKSRWQQGNVFSCSVMHEALHNHYTQKSLSLSPGS

SEQ ID NO: 72 - DNA, 684 bp, synthetic construct
  misc_feature 1..684: note = Human IgG1
  source 1..684: mol_type = other DNA
gacaagacccacacctgccccccttgtcctgcccctgagctgctgggcggaccctccgtgtttctgttcccccccaagcccaaggacaccctgatgatcagccggacccccgaggtcacctgcgtggtggtggacgtcagccacgaggacccagaggtcaagttcaattggtatgtggacggcgtggaggtgcacaacgccaagaccaagccccgggaggaacagtacaacagcacctaccgggtggtgtccgtgctgaccgtgctgcaccaggactggctgaacggcaaagaatacaagtgcaaggtgtccaacaaggccctgcctgcccccatcgagaaaaccatcagcaaggccaagggccagcccagagaaccccaggtgtacaccctgccccctagcagggaagagctgaccaagaaccaggtgtccctgacctgtctggtcaagggcttctaccccagcgatatcgccgtggagtgggagagcaacggccagcctgagaacaactacaagaccaccccccctgtgctggacagcgacggcagcttcttcctgtacagcaagctgaccgtggacaagagccggtggcagcagggcaacgtgtttagctgcagcgtgatgcacgaggccctgcacaaccactacacccagaagagcttaagcctgtcccctggcagttga

SEQ ID NO: 73 - protein, 515 aa, synthetic construct
  REGION 1..515: note = LS2330 [CTD_short_a-Fc]
GTRVQPTESIVRFPNITNLCPFGEVFNATRFASVYAWNRKRISNCVADYSVLYNSASFSTFKCYGVSPTKLNDLCFTNVYADSFVIRGDEVRQIAPGQTGKIADYNYKLPDDFTGCVIAWNSNNLDSKVGGNYNYLYRLFRKSNLKPFERDISTEIYQAGSTPCNGVEGFNCYFPLQSYGFQPTNGVGYQPYRVVVLSFELLHAPATVCGPKKSTNLVKNKCVNFNFNGLTGTGVLTESNKKFLPFQQFGRDIADTTDAVRDPQTLEILDITPCSGSGGGGDGGGGSGDKTHTCPPCPAPELLGGPSVFLFPPKPKDTLMISRTPEVTCVVVDVSHEDPEVKFNWYVDGVEVHNAKTKPREEQYNSTYRVVSVLTVLHQDWLNGKEYKCKVSNKALPAPIEKTISKAKGQPREPQVYTLPPSREELTKNQVSLTCLVKGFYPSDIAVEWESNGQPENNYKTTPPVLDSDGSFFLYSKLTVDKSRWQQGNVFSCSVMHEALHNHYTQKSLSLSPGS

SEQ ID NO: 74 - DNA, 1557 bp, synthetic construct
  misc_feature 1..1557: note = LS2330 [CTD_short_a-Fc]
  source 1..1557: mol_type = other DNA
ggtaccagggttcagcccaccgaatcaatagtacggttcccaaatatcactaatctttgccccttcggggaagtatttaacgctactcgatttgctagcgtatatgcctggaaccggaagagaataagcaactgtgttgcagactatagcgtgctttacaattccgcatcctttagtaccttcaaatgttacggtgtgagccccaccaaactcaatgatctctgtttcacaaacgtgtacgcagatagtttcgttatacgcggggacgaagtacggcagatagcccctggccagacaggaaagatagccgattacaactacaaacttccagacgattttacagggtgtgtgatcgcttggaattcaaataacctggactccaaagtgggaggcaactataattacctgtaccgactgttccgcaaaagcaacttgaaacctttcgagcgagatatatcaaccgaaatctaccaagctggttctacaccttgtaatggtgtggagggatttaactgctacttccctcttcagtcctatggatttcagcctacaaatggagtcgggtatcaaccctatagagtcgtggtgttgtcatttgaacttctccatgcacctgctactgtctgtggtccaaaaaagtccactaatcttgtaaaaaacaaatgcgtgaacttcaatttcaatggcctcaccggaacaggtgttttgacagaatctaacaaaaaattccttcccttccagcaattcgggagagatatcgctgacacaaccgacgccgtaagagatccccagactcttgagatccttgacatcaccccatgcagtggatccggcggcggcggtgacggtggtggcggctccggagacaagacccacacctgccccccttgtcctgcccctgagctgctgggcggaccctccgtgtttctgttcccccccaagcccaaggacaccctgatgatcagccggacccccgaggtcacctgcgtggtggtggacgtcagccacgaggacccagaggtcaagttcaattggtatgtggacggcgtggaggtgcacaacgccaagaccaagccccgggaggaacagtacaacagcacctaccgggtggtgtccgtgctgaccgtgctgcaccaggactggctgaacggcaaagaatacaagtgcaaggtgtccaacaaggccctgcctgcccccatcgagaaaaccatcagcaaggccaagggccagcccagagaaccccaggtgtacaccctgccccctagcagggaagagctgaccaagaaccaggtgtccctgacctgtctggtcaagggcttctaccccagcgatatcgccgtggagtgggagagcaacggccagcctgagaacaactacaagaccaccccccctgtgctggacagcgacggcagcttcttcctgtacagcaagctgaccgtggacaagagccggtggcagcagggcaacgtgtttagctgcagcgtgatgcacgaggccctgcacaaccactacacccagaagagcttaagcctgtcccctggcagttgataactcgag

SEQ ID NO: 75 - protein, 579 aa, synthetic construct
  REGION 1..579: note = LS3472, LS3473, LS3474 [CTD_long_a-Fc]
GTTLKSFTVEKGIYQTSNFRVQPTESIVRFPNITNLCPFGEVFNATRFASVYAWNRKRISNCVADYSVLYNSASFSTFKCYGVSPTKLNDLCFTNVYADSFVIRGDEVRQIAPGQTGKIADYNYKLPDDFTGCVIAWNSNNLDSKVGGNYNYLYRLFRKSNLKPFERDISTEIYQAGSTPCNGVEGFNCYFPLQSYGFQPTNGVGYQPYRVVVLSFELLHAPATVCGPKKSTNLVKNKCVNFNFNGLTGTGVLTESNKKFLPFQQFGRDIADTTDAVRDPQTLEILDITPCSFGGVSVITPGTNTSNQVAVLYQDVNCTEVPVAIHADQLTPTWRVYSTGSGGGGDGGGGSGDKTHTCPPCPAPELLGGPSVFLFPPKPKDTLMISRTPEVTCVVVDVSHEDPEVKFNWYVDGVEVHNAKTKPREEQYNSTYRVVSVLTVLHQDWLNGKEYKCKVSNKALPAPIEKTISKAKGQPREPQVYTLPPSREELTKNQVSLTCLVKGFYPSDIAVEWESNGQPENNYKTTPPVLDSDGSFFLYSKLTVDKSRWQQGNVFSCSVMHEALHNHYTQKSLSLSPGS

SEQ ID NO: 76 - DNA, 1749 bp, synthetic construct
  misc_feature 1..1749: note = LS3472, LS3473, LS3474 [CTD_long_a-Fc]
  source 1..1749: mol_type = other DNA
ggtaccaccctcaagtctttcactgtggagaaagggatctatcaaaccagcaattttagggttcagcccaccgaatcaatagtacggttcccaaatatcactaatctttgccccttcggggaagtatttaacgctactcgatttgctagcgtatatgcctggaaccggaagagaataagcaactgtgttgcagactatagcgtgctttacaattccgcatcctttagtaccttcaaatgttacggtgtgagccccaccaaactcaatgatctctgtttcacaaacgtgtacgcagatagtttcgttatacgcggggacgaagtacggcagatagcccctggccagacaggaaagatagccgattacaactacaaacttccagacgattttacagggtgtgtgatcgcttggaattcaaataacctggactccaaagtgggaggcaactataattacctgtaccgactgttccgcaaaagcaacttgaaacctttcgagcgagatatatcaaccgaaatctaccaagctggttctacaccttgtaatggtgtggagggatttaactgctacttccctcttcagtcctatggatttcagcctacaaatggagtcgggtatcaaccctatagagtcgtggtgttgtcatttgaacttctccatgcacctgctactgtctgtggtccaaaaaagtccactaatcttgtaaaaaacaaatgcgtgaacttcaatttcaatggcctcaccggaacaggtgttttgacagaatctaacaaaaaattccttcccttccagcaattcgggagagatatcgctgacacaaccgacgccgtaagagatccccagactcttgagatccttgacatcaccccatgcagttttggaggcgtgtctgtgatcacccctggcacaaacacctcaaaccaggtggctgtgctgtatcaagatgtcaattgcaccgaggtgcctgtggcaatacatgctgaccagctcaccccaacctggcgagtgtactctaccggatccggcggcggcggtgacggtggtggcggctccggagacaagacccacacctgccccccttgtcctgcccctgagctgctgggcggaccctccgtgtttctgttcccccccaagcccaaggacaccctgatgatcagccggacccccgaggtcacctgcgtggtggtggacgtcagccacgaggacccagaggtcaagttcaattggtatgtggacggcgtggaggtgcacaacgccaagaccaagccccgggaggaacagtacaacagcacctaccgggtggtgtccgtgctgaccgtgctgcaccaggactggctgaacggcaaagaatacaagtgcaaggtgtccaacaaggccctgcctgcccccatcgagaaaaccatcagcaaggccaagggccagcccagagaaccccaggtgtacaccctgccccctagcagggaagagctgaccaagaaccaggtgtccctgacctgtctggtcaagggcttctaccccagcgatatcgccgtggagtgggagagcaacggccagcctgagaacaactacaagaccaccccccctgtgctggacagcgacggcagcttcttcctgtacagcaagctgaccgtggacaagagccggtggcagcagggcaacgtgtttagctgcagcgtgatgcacgaggccctgcacaaccactacacccagaagagcttaagcctgtcccctggcagttgataactcgag

SEQ ID NO: 77 - protein, 522 aa, synthetic construct
  REGION 1..522: note = LS3477 [CTD_short_a-TEV-Fc]
MGTRVQPTESIVRFPNITNLCPFGEVFNATRFASVYAWNRKRISNCVADYSVLYNSASFSTFKCYGVSPTKLNDLCFTNVYADSFVIRGDEVRQIAPGQTGKIADYNYKLPDDFTGCVIAWNSNNLDSKVGGNYNYLYRLFRKSNLKPFERDISTEIYQAGSTPCNGVEGFNCYFPLQSYGFQPTNGVGYQPYRVVVLSFELLHAPATVCGPKKSTNLVKNKCVNFNFNGLTGTGVLTESNKKFLPFQQFGRDIADTTDAVRDPQTLEILDITPCSGSGGGGENLYFQGGGGGSGDKTHTCPPCPAPELLGGPSVFLFPPKPKDTLMISRTPEVTCVVVDVSHEDPEVKFNWYVDGVEVHNAKTKPREEQYNSTYRVVSVLTVLHQDWLNGKEYKCKVSNKALPAPIEKTISKAKGQPREPQVYTLPPSREELTKNQVSLTCLVKGFYPSDIAVEWESNGQPENNYKTTPPVLDSDGSFFLYSKLTVDKSRWQQGNVFSCSVMHEALHNHYTQKSLSLSPGS

SEQ ID NO: 78 - DNA, 1578 bp, synthetic construct
  misc_feature 1..1578: note = LS3477 [CTD_short_a-TEV-Fc]
  source 1..1578: mol_type = other DNA
atgggtaccagggttcagcccaccgaatcaatagtacggttcccaaatatcactaatctttgccccttcggggaagtatttaacgctactcgatttgctagcgtatatgcctggaaccggaagagaataagcaactgtgttgcagactatagcgtgctttacaattccgcatcctttagtaccttcaaatgttacggtgtgagccccaccaaactcaatgatctctgtttcacaaacgtgtacgcagatagtttcgttatacgcggggacgaagtacggcagatagcccctggccagacaggaaagatagccgattacaactacaaacttccagacgattttacagggtgtgtgatcgcttggaattcaaataacctggactccaaagtgggaggcaactataattacctgtaccgactgttccgcaaaagcaacttgaaacctttcgagcgagatatatcaaccgaaatctaccaagctggttctacaccttgtaatggtgtggagggatttaactgctacttccctcttcagtcctatggatttcagcctacaaatggagtcgggtatcaaccctatagagtcgtggtgttgtcatttgaacttctccatgcacctgctactgtctgtggtccaaaaaagtccactaatcttgtaaaaaacaaatgcgtgaacttcaatttcaatggcctcaccggaacaggtgttttgacagaatctaacaaaaaattccttcccttccagcaattcgggagagatatcgctgacacaaccgacgccgtaagagatccccagactcttgagatccttgacatcaccccatgcagtggatccggcggcggcggtgagaacctgtacttccaaggaggtggtggcggctccggagacaagacccacacctgccccccttgtcctgcccctgagctgctgggcggaccctccgtgtttctgttcccccccaagcccaaggacaccctgatgatcagccggacccccgaggtcacctgcgtggtggtggacgtcagccacgaggacccagaggtcaagttcaattggtatgtggacggcgtggaggtgcacaacgccaagaccaagccccgggaggaacagtacaacagcacctaccgggtggtgtccgtgctgaccgtgctgcaccaggactggctgaacggcaaagaatacaagtgcaaggtgtccaacaaggccctgcctgcccccatcgagaaaaccatcagcaaggccaagggccagcccagagaaccccaggtgtacaccctgccccctagcagggaagagctgaccaagaaccaggtgtccctgacctgtctggtcaagggcttctaccccagcgatatcgccgtggagtgggagagcaacggccagcctgagaacaactacaagaccaccccccctgtgctggacagcgacggcagcttcttcctgtacagcaagctgaccgtggacaagagccggtggcagcagggcaacgtgtttagctgcagcgtgatgcacgaggccctgcacaaccactacacccagaagagcttaagcctgtcccctggcagttgataactcgag

SEQ ID NO: 79 - protein, 585 aa, synthetic construct
  REGION 1..585: note = LS3485 [CTD_long_a-TEV-Fc]
GTTLKSFTVEKGIYQTSNFRVQPTESIVRFPNITNLCPFGEVFNATRFASVYAWNRKRISNCVADYSVLYNSASFSTFKCYGVSPTKLNDLCFTNVYADSFVIRGDEVRQIAPGQTGKIADYNYKLPDDFTGCVIAWNSNNLDSKVGGNYNYLYRLFRKSNLKPFERDISTEIYQAGSTPCNGVEGFNCYFPLQSYGFQPTNGVGYQPYRVVVLSFELLHAPATVCGPKKSTNLVKNKCVNFNFNGLTGTGVLTESNKKFLPFQQFGRDIADTTDAVRDPQTLEILDITPCSFGGVSVITPGTNTSNQVAVLYQDVNCTEVPVAIHADQLTPTWRVYSTGSGGGGENLYFQGGGGGSGDKTHTCPPCPAPELLGGPSVFLFPPKPKDTLMISRTPEVTCVVVDVSHEDPEVKFNWYVDGVEVHNAKTKPREEQYNSTYRVVSVLTVLHQDWLNGKEYKCKVSNKALPAPIEKTISKAKGQPREPQVYTLPPSREELTKNQVSLTCLVKGFYPSDIAVEWESNGQPENNYKTTPPVLDSDGSFFLYSKLTVDKSRWQQGNVFSCSVMHEALHNHYTQKSLSLSPGS

SEQ ID NO: 80 - DNA, 1770 bp, synthetic construct
  misc_feature 1..1770: note = LS3485 [CTD_long_a-TEV-Fc]
  source 1..1770: mol_type = other DNA
atgggtaccaccctcaagtctttcactgtggagaaagggatctatcaaaccagcaattttagggttcagcccaccgaatcaatagtacggttcccaaatatcactaatctttgccccttcggggaagtatttaacgctactcgatttgctagcgtatatgcctggaaccggaagagaataagcaactgtgttgcagactatagcgtgctttacaattccgcatcctttagtaccttcaaatgttacggtgtgagccccaccaaactcaatgatctctgtttcacaaacgtgtacgcagatagtttcgttatacgcggggacgaagtacggcagatagcccctggccagacaggaaagatagccgattacaactacaaacttccagacgattttacagggtgtgtgatcgcttggaattcaaataacctggactccaaagtgggaggcaactataattacctgtaccgactgttccgcaaaagcaacttgaaacctttcgagcgagatatatcaaccgaaatctaccaagctggttctacaccttgtaatggtgtggagggatttaactgctacttccctcttcagtcctatggatttcagcctacaaatggagtcgggtatcaaccctatagagtcgtggtgttgtcatttgaacttctccatgcacctgctactgtctgtggtccaaaaaagtccactaatcttgtaaaaaacaaatgcgtgaacttcaatttcaatggcctcaccggaacaggtgttttgacagaatctaacaaaaaattccttcccttccagcaattcgggagagatatcgctgacacaaccgacgccgtaagagatccccagactcttgagatccttgacatcaccccatgcagttttggaggcgtgtctgtgatcacccctggcacaaacacctcaaaccaggtggctgtgctgtatcaagatgtcaattgcaccgaggtgcctgtggcaatacatgctgaccagctcaccccaacctggcgagtgtactctaccggatccggcggcggcggtgagaacctgtacttccaaggaggtggtggcggctccggagacaagacccacacctgccccccttgtcctgcccctgagctgctgggcggaccctccgtgtttctgttcccccccaagcccaaggacaccctgatgatcagccggacccccgaggtcacctgcgtggtggtggacgtcagccacgaggacccagaggtcaagttcaattggtatgtggacggcgtggaggtgcacaacgccaagaccaagccccgggaggaacagtacaacagcacctaccgggtggtgtccgtgctgaccgtgctgcaccaggactggctgaacggcaaagaatacaagtgcaaggtgtccaacaaggccctgcctgcccccatcgagaaaaccatcagcaaggccaagggccagcccagagaaccccaggtgtacaccctgccccctagcagggaagagctgaccaagaaccaggtgtccctgacctgtctggtcaagggcttctaccccagcgatatcgccgtggagtgggagagcaacggccagcctgagaacaactacaagaccaccccccctgtgctggacagcgacggcagcttcttcctgtacagcaagctgaccgtggacaagagccggtggcagcagggcaacgtgtttagctgcagcgtgatgcacgaggccctgcacaaccactacacccagaagagcttaagcctgtcccctggcagttgataactcgag

SEQ ID NO: 81 - protein, 523 aa, synthetic construct
  REGION 1..523: note = LS3489 [CTD_short_a-Rv3c-Fc]
MGTRVQPTESIVRFPNITNLCPFGEVFNATRFASVYAWNRKRISNCVADYSVLYNSASFSTFKCYGVSPTKLNDLCFTNVYADSFVIRGDEVRQIAPGQTGKIADYNYKLPDDFTGCVIAWNSNNLDSKVGGNYNYLYRLFRKSNLKPFERDISTEIYQAGSTPCNGVEGFNCYFPLQSYGFQPTNGVGYQPYRVVVLSFELLHAPATVCGPKKSTNLVKNKCVNFNFNGLTGTGVLTESNKKFLPFQQFGRDIADTTDAVRDPQTLEILDITPCSGSGGGGLEVLFQGPGGGGSGDKTHTCPPCPAPELLGGPSVFLFPPKPKDTLMISRTPEVTCVVVDVSHEDPEVKFNWYVDGVEVHNAKTKPREEQYNSTYRVVSVLTVLHQDWLNGKEYKCKVSNKALPAPIEKTISKAKGQPREPQVYTLPPSREELTKNQVSLTCLVKGFYPSDIAVEWESNGQPENNYKTTPPVLDSDGSFFLYSKLTVDKSRWQQGNVFSCSVMHEALHNHYTQKSLSLSPGS

SEQ ID NO: 82 - DNA, 1581 bp, synthetic construct
  misc_feature 1..1581: note = LS3489 [CTD_short_a-Rv3c-Fc]
  source 1..1581: mol_type = other DNA
atgggtaccagggttcagcccaccgaatcaatagtacggttcccaaatatcactaatctttgccccttcggggaagtatttaacgctactcgatttgctagcgtatatgcctggaaccggaagagaataagcaactgtgttgcagactatagcgtgctttacaattccgcatcctttagtaccttcaaatgttacggtgtgagccccaccaaactcaatgatctctgtttcacaaacgtgtacgcagatagtttcgttatacgcggggacgaagtacggcagatagcccctggccagacaggaaagatagccgattacaactacaaacttccagacgattttacagggtgtgtgatcgcttggaattcaaataacctggactccaaagtgggaggcaactataattacctgtaccgactgttccgcaaaagcaacttgaaacctttcgagcgagatatatcaaccgaaatctaccaagctggttctacaccttgtaatggtgtggagggatttaactgctacttccctcttcagtcctatggatttcagcctacaaatggagtcgggtatcaaccctatagagtcgtggtgttgtcatttgaacttctccatgcacctgctactgtctgtggtccaaaaaagtccactaatcttgtaaaaaacaaatgcgtgaacttcaatttcaatggcctcaccggaacaggtgttttgacagaatctaacaaaaaattccttcccttccagcaattcgggagagatatcgctgacacaaccgacgccgtaagagatccccagactcttgagatccttgacatcaccccatgcagtggatccggcggcggcggtctggaggtgctgttccagggacccggtggtggcggctccggagacaagacccacacctgccccccttgtcctgcccctgagctgctgggcggaccctccgtgtttctgttcccccccaagcccaaggacaccctgatgatcagccggacccccgaggtcacctgcgtggtggtggacgtcagccacgaggacccagaggtcaagttcaattggtatgtggacggcgtggaggtgcacaacgccaagaccaagccccgggaggaacagtacaacagcacctaccgggtggtgtccgtgctgaccgtgctgcaccaggactggctgaacggcaaagaatacaagtgcaaggtgtccaacaaggccctgcctgcccccatcgagaaaaccatcagcaaggccaagggccagcccagagaaccccaggtgtacaccctgccccctagcagggaagagctgaccaagaaccaggtgtccctgacctgtctggtcaagggcttctaccccagcgatatcgccgtggagtgggagagcaacggccagcctgagaacaactacaagaccaccccccctgtgctggacagcgacggcagcttcttcctgtacagcaagctgaccgtggacaagagccggtggcagcagggcaacgtgtttagctgcagcgtgatgcacgaggccctgcacaaccactacacccagaagagcttaagcctgtcccctggcagttgataactcgag

SEQ ID NO: 83 - protein, 587 aa, synthetic construct
  REGION 1..587: note = LS3497 [CTD_long_a-Rv3c-Fc]
MGTTLKSFTVEKGIYQTSNFRVQPTESIVRFPNITNLCPFGEVFNATRFASVYAWNRKRISNCVADYSVLYNSASFSTFKCYGVSPTKLNDLCFTNVYADSFVIRGDEVRQIAPGQTGKIADYNYKLPDDFTGCVIAWNSNNLDSKVGGNYNYLYRLFRKSNLKPFERDISTEIYQAGSTPCNGVEGFNCYFPLQSYGFQPTNGVGYQPYRVVVLSFELLHAPATVCGPKKSTNLVKNKCVNFNFNGLTGTGVLTESNKKFLPFQQFGRDIADTTDAVRDPQTLEILDITPCSFGGVSVITPGTNTSNQVAVLYQDVNCTEVPVAIHADQLTPTWRVYSTGSGGGGLEVLFQGPGGGGSGDKTHTCPPCPAPELLGGPSVFLFPPKPKDTLMISRTPEVTCVVVDVSHEDPEVKFNWYVDGVEVHNAKTKPREEQYNSTYRVVSVLTVLHQDWLNGKEYKCKVSNKALPAPIEKTISKAKGQPREPQVYTLPPSREELTKNQVSLTCLVKGFYPSDIAVEWESNGQPENNYKTTPPVLDSDGSFFLYSKLTVDKSRWQQGNVFSCSVMHEALHNHYTQKSLSLSPGS

SEQ ID NO: 84 - DNA, 1773 bp, synthetic construct
  misc_feature 1..1773: note = LS3497 [CTD_long_a-Rv3c-Fc]
  source 1..1773: mol_type = other DNA
atgggtaccaccctcaagtctttcactgtggagaaagggatctatcaaaccagcaattttagggttcagcccaccgaatcaatagtacggttcccaaatatcactaatctttgccccttcggggaagtatttaacgctactcgatttgctagcgtatatgcctggaaccggaagagaataagcaactgtgttgcagactatagcgtgctttacaattccgcatcctttagtaccttcaaatgttacggtgtgagccccaccaaactcaatgatctctgtttcacaaacgtgtacgcagatagtttcgttatacgcggggacgaagtacggcagatagcccctggccagacaggaaagatagccgattacaactacaaacttccagacgattttacagggtgtgtgatcgcttggaattcaaataacctggactccaaagtgggaggcaactataattacctgtaccgactgttccgcaaaagcaacttgaaacctttcgagcgagatatatcaaccgaaatctaccaagctggttctacaccttgtaatggtgtggagggatttaactgctacttccctcttcagtcctatggatttcagcctacaaatggagtcgggtatcaaccctatagagtcgtggtgttgtcatttgaacttctccatgcacctgctactgtctgtggtccaaaaaagtccactaatcttgtaaaaaacaaatgcgtgaacttcaatttcaatggcctcaccggaacaggtgttttgacagaatctaacaaaaaattccttcccttccagcaattcgggagagatatcgctgacacaaccgacgccgtaagagatccccagactcttgagatccttgacatcaccccatgcagttttggaggcgtgtctgtgatcacccctggcacaaacacctcaaaccaggtggctgtgctgtatcaagatgtcaattgcaccgaggtgcctgtggcaatacatgctgaccagctcaccccaacctggcgagtgtactctaccggatccggcggcggcggtctggaggtgctgttccagggacccggtggtggcggctccggagacaagacccacacctgccccccttgtcctgcccctgagctgctgggcggaccctccgtgtttctgttcccccccaagcccaaggacaccctgatgatcagccggacccccgaggtcacctgcgtggtggtggacgtcagccacgaggacccagaggtcaagttcaattggtatgtggacggcgtggaggtgcacaacgccaagaccaagccccgggaggaacagtacaacagcacctaccgggtggtgtccgtgctgaccgtgctgcaccaggactggctgaacggcaaagaatacaagtgcaaggtgtccaacaaggccctgcctgcccccatcgagaaaaccatcagcaaggccaagggccagcccagagaaccccaggtgtacaccctgccccctagcagggaagagctgaccaagaaccaggtgtccctgacctgtctggtcaagggcttctaccccagcgatatcgccgtggagtgggagagcaacggccagcctgagaacaactacaagaccaccccccctgtgctggacagcgacggcagcttcttcctgtacagcaagctgaccgtggacaagagccggtggcagcagggcaacgtgtttagctgcagcgtgatgcacgaggccctgcacaaccactacacccagaagagcttaagcctgtcccctggcagttgataactcgag

SEQ ID NO: 85 - protein, 358 aa, synthetic construct
  REGION 1..358: note = LS2316, LS2317, LS2318, LS2319 [CTD_long_a-His
TLKSFTVEKGIYQTSNFRVQPTESIVRFPNITNLCPFGEVFNATRFASVYAWNRKRISNCVADYSVLYNSASFSTFKCYGVSPTKLNDLCFTNVYADSFVIRGDEVRQIAPGQTGKIADYNYKLPDDFTGCVIAWNSNNLDSKVGGNYNYLYRLFRKSNLKPFERDISTEIYQAGSTPCNGVEGFNCYFPLQSYGFQPTNGVGYQPYRVVVLSFELLHAPATVCGPKKSTNLVKNKCVNFNFNGLTGTGVLTESNKKFLPFQQFGRDIADTTDAVRDPQTLEILDITPCSFGGVSVITPGTNTSNQVAVLYQDVNCTEVPVAIHADQLTPTWRVYSTGSSGGGGSGGGGSHHHHHHHH

SEQ ID NO: 86 - DNA, 1086 bp, synthetic construct
  misc_feature 1..1086: note = LS2316, LS2317, LS2318, LS2319 [CTD_long_a-His
  source 1..1086: mol_type = other DNA
accctcaagtctttcactgtggagaaagggatctatcaaaccagcaattttagggttcagcccaccgaatcaatagtacggttcccaaatatcactaatctttgccccttcggggaagtatttaacgctactcgatttgctagcgtatatgcctggaaccggaagagaataagcaactgtgttgcagactatagcgtgctttacaattccgcatcctttagtaccttcaaatgttacggtgtgagccccaccaaactcaatgatctctgtttcacaaacgtgtacgcagatagtttcgttatacgcggggacgaagtacggcagatagcccctggccagacaggaaagatagccgattacaactacaaacttccagacgattttacagggtgtgtgatcgcttggaattcaaataacctggactccaaagtgggaggcaactataattacctgtaccgactgttccgcaaaagcaacttgaaacctttcgagcgagatatatcaaccgaaatctaccaagctggttctacaccttgtaatggtgtggagggatttaactgctacttccctcttcagtcctatggatttcagcctacaaatggagtcgggtatcaaccctatagagtcgtggtgttgtcatttgaacttctccatgcacctgctactgtctgtggtccaaaaaagtccactaatcttgtaaaaaacaaatgcgtgaacttcaatttcaatggcctcaccggaacaggtgttttgacagaatctaacaaaaaattccttcccttccagcaattcgggagagatatcgctgacacaaccgacgccgtaagagatccccagactcttgagatccttgacatcaccccatgcagttttggaggcgtgtctgtgatcacccctggcacaaacacctcaaaccaggtggctgtgctgtatcaagatgtcaattgcaccgaggtgcctgtggcaatacatgctgaccagctcaccccaacctggcgagtgtactctaccggaagtagtggaggtggaggcagtggaggcggaggtagtcatcatcatcaccaccaccatcactgataactcgag

SEQ ID NO: 87 - protein, 513 aa, synthetic construct
  REGION 1..513: note = LS3479 [NTD_short_a-TEV-Fc]
MGTRGVYYPDKVFRSSVLHSTQDLFLPFFSNVTWFHAIHVSGTNGTKRFDNPVLPFNDGVYFASTEKSNIIRGWIFGTTLDSKTQSLLIVNNATNVVIKVCEFQFCNDPFLGVYYHKNNKSWMESEFRVYSSANNCTFEYVSQPFLMDLEGKQGNFKNLREFVFKNIDGYFKIYSKHTPINLVRDLPQGFSALEPLVDLPIGINITRFQTLLALHRSYLTPGDSSSGWTAGAAAYYVGYLQPRTFLLKYNENGTITDAVDCALDPLSGSGGGGENLYFQGGGGGSGDKTHTCPPCPAPELLGGPSVFLFPPKPKDTLMISRTPEVTCVVVDVSHEDPEVKFNWYVDGVEVHNAKTKPREEQYNSTYRVVSVLTVLHQDWLNGKEYKCKVSNKALPAPIEKTISKAKGQPREPQVYTLPPSREELTKNQVSLTCLVKGFYPSDIAVEWESNGQPENNYKTTPPVLDSDGSFFLYSKLTVDKSRWQQGNVFSCSVMHEALHNHYTQKSLSLSPGS

SEQ ID NO: 88 - DNA, 1551 bp, synthetic construct
  misc_feature 1..1551: note = LS3479 [NTD_short_a-TEV-Fc]
  source 1..1551: mol_type = other DNA
atgggtacccgtggtgtatactaccccgataaggtttttcgctcttccgtgctccatagtacacaggatctcttcctgccattcttcagtaatgtcacctggtttcatgctattcatgtgtctggaactaatggaaccaagcgctttgataatccagtactcccttttaatgacggagtttacttcgcaagcacagaaaagtccaatatcatacgcgggtggattttcggaactaccctcgactccaagactcaatcactccttatagtcaataacgccaccaatgtggtcatcaaagtctgtgaatttcaattttgcaacgacccattcctgggcgtctactatcataaaaacaataagagctggatggaatccgaatttagagtatacagttctgctaataattgcacattcgaatatgtatcccaacccttccttatggatttggagggcaagcaaggcaatttcaaaaacttgcgggaatttgtcttcaaaaacatagatgggtacttcaaaatttatagtaagcatacacctattaacttggttcgagacttgcctcagggcttcagcgcccttgaacctcttgtggatttgccaatcggcatcaatataacacgatttcagacactcttggcactgcatcgttcctacctgactccaggagactctagctctggttggacagcaggcgccgctgcttactatgtcggctacttgcaacctcgaacattccttctcaaatataacgaaaatggaactatcacagatgccgtggattgtgccttggaccctctctcaggatccggcggcggcggtgagaacctgtacttccaaggaggtggtggcggctccggagacaagacccacacctgccccccttgtcctgcccctgagctgctgggcggaccctccgtgtttctgttcccccccaagcccaaggacaccctgatgatcagccggacccccgaggtcacctgcgtggtggtggacgtcagccacgaggacccagaggtcaagttcaattggtatgtggacggcgtggaggtgcacaacgccaagaccaagccccgggaggaacagtacaacagcacctaccgggtggtgtccgtgctgaccgtgctgcaccaggactggctgaacggcaaagaatacaagtgcaaggtgtccaacaaggccctgcctgcccccatcgagaaaaccatcagcaaggccaagggccagcccagagaaccccaggtgtacaccctgccccctagcagggaagagctgaccaagaaccaggtgtccctgacctgtctggtcaagggcttctaccccagcgatatcgccgtggagtgggagagcaacggccagcctgagaacaactacaagaccaccccccctgtgctggacagcgacggcagcttcttcctgtacagcaagctgaccgtggacaagagccggtggcagcagggcaacgtgtttagctgcagcgtgatgcacgaggccctgcacaaccactacacccagaagagcttaagcctgtcccctggcagttgataactcgag

SEQ ID NO: 89 - protein, 543 aa, synthetic construct
  REGION 1..543: note = LS3475 [NTD_long_a-TEV-Fc]
MGTVNLTTRTQLPPAYTNSFTRGVYYPDKVFRSSVLHSTQDLFLPFFSNVTWFHAIHVSGTNGTKRFDNPVLPFNDGVYFASTEKSNIIRGWIFGTTLDSKTQSLLIVNNATNVVIKVCEFQFCNDPFLGVYYHKNNKSWMESEFRVYSSANNCTFEYVSQPFLMDLEGKQGNFKNLREFVFKNIDGYFKIYSKHTPINLVRDLPQGFSALEPLVDLPIGINITRFQTLLALHRSYLTPGDSSSGWTAGAAAYYVGYLQPRTFLLKYNENGTITDAVDCALDPLSETKCTLKSFTVEGSGGGGENLYFQGGGGGSGDKTHTCPPCPAPELLGGPSVFLFPPKPKDTLMISRTPEVTCVVVDVSHEDPEVKFNWYVDGVEVHNAKTKPREEQYNSTYRVVSVLTVLHQDWLNGKEYKCKVSNKALPAPIEKTISKAKGQPREPQVYTLPPSREELTKNQVSLTCLVKGFYPSDIAVEWESNGQPENNYKTTPPVLDSDGSFFLYSKLTVDKSRWQQGNVFSCSVMHEALHNHYTQKSLSLSPGS

SEQ ID NO: 90 - DNA, 1641 bp, synthetic construct
  misc_feature 1..1641: note = LS3475 [NTD_long_a-TEV-Fc]
  source 1..1641: mol_type = other DNA
atgggtaccgtgaatcttactacacgtacacagctgccaccagcctataccaacagttttactcgtggtgtatactaccccgataaggtttttcgctcttccgtgctccatagtacacaggatctcttcctgccattcttcagtaatgtcacctggtttcatgctattcatgtgtctggaactaatggaaccaagcgctttgataatccagtactcccttttaatgacggagtttacttcgcaagcacagaaaagtccaatatcatacgcgggtggattttcggaactaccctcgactccaagactcaatcactccttatagtcaataacgccaccaatgtggtcatcaaagtctgtgaatttcaattttgcaacgacccattcctgggcgtctactatcataaaaacaataagagctggatggaatccgaatttagagtatacagttctgctaataattgcacattcgaatatgtatcccaacccttccttatggatttggagggcaagcaaggcaatttcaaaaacttgcgggaatttgtcttcaaaaacatagatgggtacttcaaaatttatagtaagcatacacctattaacttggttcgagacttgcctcagggcttcagcgcccttgaacctcttgtggatttgccaatcggcatcaatataacacgatttcagacactcttggcactgcatcgttcctacctgactccaggagactctagctctggttggacagcaggcgccgctgcttactatgtcggctacttgcaacctcgaacattccttctcaaatataacgaaaatggaactatcacagatgccgtggattgtgccttggaccctctctcagagactaagtgtaccctcaagtctttcactgtggagggatccggcggcggcggtgagaacctgtacttccaaggaggtggtggcggctccggagacaagacccacacctgccccccttgtcctgcccctgagctgctgggcggaccctccgtgtttctgttcccccccaagcccaaggacaccctgatgatcagccggacccccgaggtcacctgcgtggtggtggacgtcagccacgaggacccagaggtcaagttcaattggtatgtggacggcgtggaggtgcacaacgccaagaccaagccccgggaggaacagtacaacagcacctaccgggtggtgtccgtgctgaccgtgctgcaccaggactggctgaacggcaaagaatacaagtgcaaggtgtccaacaaggccctgcctgcccccatcgagaaaaccatcagcaaggccaagggccagcccagagaaccccaggtgtacaccctgccccctagcagggaagagctgaccaagaaccaggtgtccctgacctgtctggtcaagggcttctaccccagcgatatcgccgtggagtgggagagcaacggccagcctgagaacaactacaagaccaccccccctgtgctggacagcgacggcagcttcttcctgtacagcaagctgaccgtggacaagagccggtggcagcagggcaacgtgtttagctgcagcgtgatgcacgaggccctgcacaaccactacacccagaagagcttaagcctgtcccctggcagttgataactcgag

SEQ ID NO: 91 - protein, 514 aa, synthetic construct
  REGION 1..514: note = LS3491 [NTD_short_a-Rv3c-Fc]
MGTRGVYYPDKVFRSSVLHSTQDLFLPFFSNVTWFHAIHVSGTNGTKRFDNPVLPFNDGVYFASTEKSNIIRGWIFGTTLDSKTQSLLIVNNATNVVIKVCEFQFCNDPFLGVYYHKNNKSWMESEFRVYSSANNCTFEYVSQPFLMDLEGKQGNFKNLREFVFKNIDGYFKIYSKHTPINLVRDLPQGFSALEPLVDLPIGINITRFQTLLALHRSYLTPGDSSSGWTAGAAAYYVGYLQPRTFLLKYNENGTITDAVDCALDPLSGSGGGGLEVLFQGPGGGGSGDKTHTCPPCPAPELLGGPSVFLFPPKPKDTLMISRTPEVTCVVVDVSHEDPEVKFNWYVDGVEVHNAKTKPREEQYNSTYRVVSVLTVLHQDWLNGKEYKCKVSNKALPAPIEKTISKAKGQPREPQVYTLPPSREELTKNQVSLTCLVKGFYPSDIAVEWESNGQPENNYKTTPPVLDSDGSFFLYSKLTVDKSRWQQGNVFSCSVMHEALHNHYTQKSLSLSPGS

SEQ ID NO: 92 - DNA, 1554 bp, synthetic construct
  misc_feature 1..1554: note = LS3491 [NTD_short_a-Rv3c-Fc]
  source 1..1554: mol_type = other DNA
atgggtacccgtggtgtatactaccccgataaggtttttcgctcttccgtgctccatagtacacaggatctcttcctgccattcttcagtaatgtcacctggtttcatgctattcatgtgtctggaactaatggaaccaagcgctttgataatccagtactcccttttaatgacggagtttacttcgcaagcacagaaaagtccaatatcatacgcgggtggattttcggaactaccctcgactccaagactcaatcactccttatagtcaataacgccaccaatgtggtcatcaaagtctgtgaatttcaattttgcaacgacccattcctgggcgtctactatcataaaaacaataagagctggatggaatccgaatttagagtatacagttctgctaataattgcacattcgaatatgtatcccaacccttccttatggatttggagggcaagcaaggcaatttcaaaaacttgcgggaatttgtcttcaaaaacatagatgggtacttcaaaatttatagtaagcatacacctattaacttggttcgagacttgcctcagggcttcagcgcccttgaacctcttgtggatttgccaatcggcatcaatataacacgatttcagacactcttggcactgcatcgttcctacctgactccaggagactctagctctggttggacagcaggcgccgctgcttactatgtcggctacttgcaacctcgaacattccttctcaaatataacgaaaatggaactatcacagatgccgtggattgtgccttggaccctctctcaggatccggcggcggcggtctggaggtgctgttccagggacccggtggtggcggctccggagacaagacccacacctgccccccttgtcctgcccctgagctgctgggcggaccctccgtgtttctgttcccccccaagcccaaggacaccctgatgatcagccggacccccgaggtcacctgcgtggtggtggacgtcagccacgaggacccagaggtcaagttcaattggtatgtggacggcgtggaggtgcacaacgccaagaccaagccccgggaggaacagtacaacagcacctaccgggtggtgtccgtgctgaccgtgctgcaccaggactggctgaacggcaaagaatacaagtgcaaggtgtccaacaaggccctgcctgcccccatcgagaaaaccatcagcaaggccaagggccagcccagagaaccccaggtgtacaccctgccccctagcagggaagagctgaccaagaaccaggtgtccctgacctgtctggtcaagggcttctaccccagcgatatcgccgtggagtgggagagcaacggccagcctgagaacaactacaagaccaccccccctgtgctggacagcgacggcagcttcttcctgtacagcaagctgaccgtggacaagagccggtggcagcagggcaacgtgtttagctgcagcgtgatgcacgaggccctgcacaaccactacacccagaagagcttaagcctgtcccctggcagttgataactcgag

SEQ ID NO: 93 - protein, 544 aa, synthetic construct
  REGION 1..544: note = LS3487 [NTD_long_a-Rv3C-Fc]
MGTVNLTTRTQLPPAYTNSFTRGVYYPDKVFRSSVLHSTQDLFLPFFSNVTWFHAIHVSGTNGTKRFDNPVLPFNDGVYFASTEKSNIIRGWIFGTTLDSKTQSLLIVNNATNVVIKVCEFQFCNDPFLGVYYHKNNKSWMESEFRVYSSANNCTFEYVSQPFLMDLEGKQGNFKNLREFVFKNIDGYFKIYSKHTPINLVRDLPQGFSALEPLVDLPIGINITRFQTLLALHRSYLTPGDSSSGWTAGAAAYYVGYLQPRTFLLKYNENGTITDAVDCALDPLSETKCTLKSFTVEGSGGGGLEVLFQGPGGGGSGDKTHTCPPCPAPELLGGPSVFLFPPKPKDTLMISRTPEVTCVVVDVSHEDPEVKFNWYVDGVEVHNAKTKPREEQYNSTYRVVSVLTVLHQDWLNGKEYKCKVSNKALPAPIEKTISKAKGQPREPQVYTLPPSREELTKNQVSLTCLVKGFYPSDIAVEWESNGQPENNYKTTPPVLDSDGSFFLYSKLTVDKSRWQQGNVFSCSVMHEALHNHYTQKSLSLSPGS

SEQ ID NO: 94 - DNA, 1644 bp, synthetic construct
  misc_feature 1..1644: note = LS3487 [NTD_long_a-Rv3C-Fc]
  source 1..1644: mol_type = other DNA
atgggtaccgtgaatcttactacacgtacacagctgccaccagcctataccaacagttttactcgtggtgtatactaccccgataaggtttttcgctcttccgtgctccatagtacacaggatctcttcctgccattcttcagtaatgtcacctggtttcatgctattcatgtgtctggaactaatggaaccaagcgctttgataatccagtactcccttttaatgacggagtttacttcgcaagcacagaaaagtccaatatcatacgcgggtggattttcggaactaccctcgactccaagactcaatcactccttatagtcaataacgccaccaatgtggtcatcaaagtctgtgaatttcaattttgcaacgacccattcctgggcgtctactatcataaaaacaataagagctggatggaatccgaatttagagtatacagttctgctaataattgcacattcgaatatgtatcccaacccttccttatggatttggagggcaagcaaggcaatttcaaaaacttgcgggaatttgtcttcaaaaacatagatgggtacttcaaaatttatagtaagcatacacctattaacttggttcgagacttgcctcagggcttcagcgcccttgaacctcttgtggatttgccaatcggcatcaatataacacgatttcagacactcttggcactgcatcgttcctacctgactccaggagactctagctctggttggacagcaggcgccgctgcttactatgtcggctacttgcaacctcgaacattccttctcaaatataacgaaaatggaactatcacagatgccgtggattgtgccttggaccctctctcagagactaagtgtaccctcaagtctttcactgtggagggatccggcggcggcggtctggaggtgctgttccagggacccggtggtggcggctccggagacaagacccacacctgccccccttgtcctgcccctgagctgctgggcggaccctccgtgtttctgttcccccccaagcccaaggacaccctgatgatcagccggacccccgaggtcacctgcgtggtggtggacgtcagccacgaggacccagaggtcaagttcaattggtatgtggacggcgtggaggtgcacaacgccaagaccaagccccgggaggaacagtacaacagcacctaccgggtggtgtccgtgctgaccgtgctgcaccaggactggctgaacggcaaagaatacaagtgcaaggtgtccaacaaggccctgcctgcccccatcgagaaaaccatcagcaaggccaagggccagcccagagaaccccaggtgtacaccctgccccctagcagggaagagctgaccaagaaccaggtgtccctgacctgtctggtcaagggcttctaccccagcgatatcgccgtggagtgggagagcaacggccagcctgagaacaactacaagaccaccccccctgtgctggacagcgacggcagcttcttcctgtacagcaagctgaccgtggacaagagccggtggcagcagggcaacgtgtttagctgcagcgtgatgcacgaggccctgcacaaccactacacccagaagagcttaagcctgtcccctggcagttgataactcgag

SEQ ID NO: 95 - protein, 537 aa, synthetic construct
  REGION 1..537: note = LS2326 [NTD_long_a-Fc]
MGTVNLTTRTQLPPAYTNSFTRGVYYPDKVFRSSVLHSTQDLFLPFFSNVTWFHAIHVSGTNGTKRFDNPVLPFNDGVYFASTEKSNIIRGWIFGTTLDSKTQSLLIVNNATNVVIKVCEFQFCNDPFLGVYYHKNNKSWMESEFRVYSSANNCTFEYVSQPFLMDLEGKQGNFKNLREFVFKNIDGYFKIYSKHTPINLVRDLPQGFSALEPLVDLPIGINITRFQTLLALHRSYLTPGDSSSGWTAGAAAYYVGYLQPRTFLLKYNENGTITDAVDCALDPLSETKCTLKSFTVEGSGGGGDGGGGSGDKTHTCPPCPAPELLGGPSVFLFPPKPKDTLMISRTPEVTCVVVDVSHEDPEVKFNWYVDGVEVHNAKTKPREEQYNSTYRVVSVLTVLHQDWLNGKEYKCKVSNKALPAPIEKTISKAKGQPREPQVYTLPPSREELTKNQVSLTCLVKGFYPSDIAVEWESNGQPENNYKTTPPVLDSDGSFFLYSKLTVDKSRWQQGNVFSCSVMHEALHNHYTQKSLSLSPGS

SEQ ID NO: 96 - DNA, 1623 bp, synthetic construct
  misc_feature 1..1623: note = LS2326 [NTD_long_a-Fc]
  source 1..1623: mol_type = other DNA
atgggtaccgtgaatcttactacacgtacacagctgccaccagcctataccaacagttttactcgtggtgtatactaccccgataaggtttttcgctcttccgtgctccatagtacacaggatctcttcctgccattcttcagtaatgtcacctggtttcatgctattcatgtgtctggaactaatggaaccaagcgctttgataatccagtactcccttttaatgacggagtttacttcgcaagcacagaaaagtccaatatcatacgcgggtggattttcggaactaccctcgactccaagactcaatcactccttatagtcaataacgccaccaatgtggtcatcaaagtctgtgaatttcaattttgcaacgacccattcctgggcgtctactatcataaaaacaataagagctggatggaatccgaatttagagtatacagttctgctaataattgcacattcgaatatgtatcccaacccttccttatggatttggagggcaagcaaggcaatttcaaaaacttgcgggaatttgtcttcaaaaacatagatgggtacttcaaaatttatagtaagcatacacctattaacttggttcgagacttgcctcagggcttcagcgcccttgaacctcttgtggatttgccaatcggcatcaatataacacgatttcagacactcttggcactgcatcgttcctacctgactccaggagactctagctctggttggacagcaggcgccgctgcttactatgtcggctacttgcaacctcgaacattccttctcaaatataacgaaaatggaactatcacagatgccgtggattgtgccttggaccctctctcagagactaagtgtaccctcaagtctttcactgtggagggatccggcggcggcggtgacggtggtggcggctccggagacaagacccacacctgccccccttgtcctgcccctgagctgctgggcggaccctccgtgtttctgttcccccccaagcccaaggacaccctgatgatcagccggacccccgaggtcacctgcgtggtggtggacgtcagccacgaggacccagaggtcaagttcaattggtatgtggacggcgtggaggtgcacaacgccaagaccaagccccgggaggaacagtacaacagcacctaccgggtggtgtccgtgctgaccgtgctgcaccaggactggctgaacggcaaagaatacaagtgcaaggtgtccaacaaggccctgcctgcccccatcgagaaaaccatcagcaaggccaagggccagcccagagaaccccaggtgtacaccctgccccctagcagggaagagctgaccaagaaccaggtgtccctgacctgtctggtcaagggcttctaccccagcgatatcgccgtggagtgggagagcaacggccagcctgagaacaactacaagaccaccccccctgtgctggacagcgacggcagcttcttcctgtacagcaagctgaccgtggacaagagccggtggcagcagggcaacgtgtttagctgcagcgtgatgcacgaggccctgcacaaccactacacccagaagagcttaagcctgtcccctggcagttgataactcgag

SEQ ID NO: 97 - protein, 577 aa, synthetic construct
  REGION 1..577: note = LS2354 [CTD_long_a_D614G-Fc]
TLKSFTVEKGIYQTSNFRVQPTESIVRFPNITNLCPFGEVFNATRFASVYAWNRKRISNCVADYSVLYNSASFSTFKCYGVSPTKLNDLCFTNVYADSFVIRGDEVRQIAPGQTGKIADYNYKLPDDFTGCVIAWNSNNLDSKVGGNYNYLYRLFRKSNLKPFERDISTEIYQAGSTPCNGVEGFNCYFPLQSYGFQPTNGVGYQPYRVVVLSFELLHAPATVCGPKKSTNLVKNKCVNFNFNGLTGTGVLTESNKKFLPFQQFGRDIADTTDAVRDPQTLEILDITPCSFGGVSVITPGTNTSNQVAVLYQGVNCTEVPVAIHADQLTPTWRVYSTGSGGGGDGGGGSGDKTHTCPPCPAPELLGGPSVFLFPPKPKDTLMISRTPEVTCVVVDVSHEDPEVKFNWYVDGVEVHNAKTKPREEQYNSTYRVVSVLTVLHQDWLNGKEYKCKVSNKALPAPIEKTISKAKGQPREPQVYTLPPSREELTKNQVSLTCLVKGFYPSDIAVEWESNGQPENNYKTTPPVLDSDGSFFLYSKLTVDKSRWQQGNVFSCSVMHEALHNHYTQKSLSLSPGS

SEQ ID NO: 98 - DNA, 1734 bp, synthetic construct
  misc_feature 1..1734: note = LS2354 [CTD_long_a_D614G-Fc]
  source 1..1734: mol_type = other DNA
accctcaagtctttcactgtggagaaagggatctatcaaaccagcaattttagggttcagcccaccgaatcaatagtacggttcccaaatatcactaatctttgccccttcggggaagtatttaacgctactcgatttgctagcgtatatgcctggaaccggaagagaataagcaactgtgttgcagactatagcgtgctttacaattccgcatcctttagtaccttcaaatgttacggtgtgagccccaccaaactcaatgatctctgtttcacaaacgtgtacgcagatagtttcgttatacgcggggacgaagtacggcagatagcccctggccagacaggaaagatagccgattacaactacaaacttccagacgattttacagggtgtgtgatcgcttggaattcaaataacctggactccaaagtgggaggcaactataattacctgtaccgactgttccgcaaaagcaacttgaaacctttcgagcgagatatatcaaccgaaatctaccaagctggttctacaccttgtaatggtgtggagggatttaactgctacttccctcttcagtcctatggatttcagcctacaaatggagtcgggtatcaaccctatagagtcgtggtgttgtcatttgaacttctccatgcacctgctactgtctgtggtccaaaaaagtccactaatcttgtaaaaaacaaatgcgtgaacttcaatttcaatggcctcaccggaacaggtgttttgacagaatctaacaaaaaattccttcccttccagcaattcgggagagatatcgctgacacaaccgacgccgtaagagatccccagactcttgagatccttgacatcaccccatgcagttttggaggcgtgtctgtgatcacccctggcacaaacacctcaaaccaggtggctgtgctgtatcaaggtgtcaattgcaccgaggtgcctgtggcaatacatgctgaccagctcaccccaacctggcgagtgtactctaccggatccggcggcggcggtgacggtggtggcggctccggagacaagacccacacctgccccccttgtcctgcccctgagctgctgggcggaccctccgtgtttctgttcccccccaagcccaaggacaccctgatgatcagccggacccccgaggtcacctgcgtggtggtggacgtcagccacgaggacccagaggtcaagttcaattggtatgtggacggcgtggaggtgcacaacgccaagaccaagccccgggaggaacagtacaacagcacctaccgggtggtgtccgtgctgaccgtgctgcaccaggactggctgaacggcaaagaatacaagtgcaaggtgtccaacaaggccctgcctgcccccatcgagaaaaccatcagcaaggccaagggccagcccagagaaccccaggtgtacaccctgccccctagcagggaagagctgaccaagaaccaggtgtccctgacctgtctggtcaagggcttctaccccagcgatatcgccgtggagtgggagagcaacggccagcctgagaacaactacaagaccaccccccctgtgctggacagcgacggcagcttcttcctgtacagcaagctgaccgtggacaagagccggtggcagcagggcaacgtgtttagctgcagcgtgatgcacgaggccctgcacaaccactacacccagaagagcttaagcctgtcccctggcagttga

SEQ ID NO: 99 - protein, 924 aa, synthetic construct
  REGION 1..924: note = LS2355 [CTD_long_a-dimer-Fc]
TLKSFTVEKGIYQTSNFRVQPTESIVRFPNITNLCPFGEVFNATRFASVYAWNRKRISNCVADYSVLYNSASFSTFKCYGVSPTKLNDLCFTNVYADSFVIRGDEVRQIAPGQTGKIADYNYKLPDDFTGCVIAWNSNNLDSKVGGNYNYLYRLFRKSNLKPFERDISTEIYQAGSTPCNGVEGFNCYFPLQSYGFQPTNGVGYQPYRVVVLSFELLHAPATVCGPKKSTNLVKNKCVNFNFNGLTGTGVLTESNKKFLPFQQFGRDIADTTDAVRDPQTLEILDITPCSFGGVSVITPGTNTSNQVAVLYQDVNCTEVPVAIHADQLTPTWRVYSTGGGGSGGGGSTLKSFTVEKGIYQTSNFRVQPTESIVRFPNITNLCPFGEVFNATRFASVYAWNRKRISNCVADYSVLYNSASFSTFKCYGVSPTKLNDLCFTNVYADSFVIRGDEVRQIAPGQTGKIADYNYKLPDDFTGCVIAWNSNNLDSKVGGNYNYLYRLFRKSNLKPFERDISTEIYQAGSTPCNGVEGFNCYFPLQSYGFQPTNGVGYQPYRVVVLSFELLHAPATVCGPKKSTNLVKNKCVNFNFNGLTGTGVLTESNKKFLPFQQFGRDIADTTDAVRDPQTLEILDITPCSFGGVSVITPGTNTSNQVAVLYQDVNCTEVPVAIHADQLTPTWRVYSTGSGGGGDGGGGSGDKTHTCPPCPAPELLGGPSVFLFPPKPKDTLMISRTPEVTCVVVDVSHEDPEVKFNWYVDGVEVHNAKTKPREEQYNSTYRVVSVLTVLHQDWLNGKEYKCKVSNKALPAPIEKTISKAKGQPREPQVYTLPPSREELTKNQVSLTCLVKGFYPSDIAVEWESNGQPENNYKTTPPVLDSDGSFFLYSKLTVDKSRWQQGNVFSCSVMHEALHNHYTQKSLSLSPGS

SEQ ID NO: 100 - DNA, 2775 bp, synthetic construct
  misc_feature 1..2775: note = LS2355 [CTD_long_a-dimer-Fc]
  source 1..2775: mol_type = other DNA
accctcaagtctttcactgtggagaaagggatctatcaaaccagcaattttagggttcagcccaccgaatcaatagtacggttcccaaatatcactaatctttgccccttcggggaagtatttaacgctactcgatttgctagcgtatatgcctggaaccggaagagaataagcaactgtgttgcagactatagcgtgctttacaattccgcatcctttagtaccttcaaatgttacggtgtgagccccaccaaactcaatgatctctgtttcacaaacgtgtacgcagatagtttcgttatacgcggggacgaagtacggcagatagcccctggccagacaggaaagatagccgattacaactacaaacttccagacgattttacagggtgtgtgatcgcttggaattcaaataacctggactccaaagtgggaggcaactataattacctgtaccgactgttccgcaaaagcaacttgaaacctttcgagcgagatatatcaaccgaaatctaccaagctggttctacaccttgtaatggtgtggagggatttaactgctacttccctcttcagtcctatggatttcagcctacaaatggagtcgggtatcaaccctatagagtcgtggtgttgtcatttgaacttctccatgcacctgctactgtctgtggtccaaaaaagtccactaatcttgtaaaaaacaaatgcgtgaacttcaatttcaatggcctcaccggaacaggtgttttgacagaatctaacaaaaaattccttcccttccagcaattcgggagagatatcgctgacacaaccgacgccgtaagagatccccagactcttgagatccttgacatcaccccatgcagttttggaggcgtgtctgtgatcacccctggcacaaacacctcaaaccaggtggctgtgctgtatcaagatgtcaattgcaccgaggtgcctgtggcaatacatgctgaccagctcaccccaacctggcgagtgtactctaccggtggcggtggctccgggggcggaggttccaccctcaagtctttcactgtggagaaagggatctatcaaaccagcaattttagggttcagcccaccgaatcaatagtacggttcccaaatatcactaatctttgccccttcggggaagtatttaacgctactcgatttgctagcgtatatgcctggaaccggaagagaataagcaactgtgttgcagactatagcgtgctttacaattccgcatcctttagtaccttcaaatgttacggtgtgagccccaccaaactcaatgatctctgtttcacaaacgtgtacgcagatagtttcgttatacgcggggacgaagtacggcagatagcccctggccagacaggaaagatagccgattacaactacaaacttccagacgattttacagggtgtgtgatcgcttggaattcaaataacctggactccaaagtgggaggcaactataattacctgtaccgactgttccgcaaaagcaacttgaaacctttcgagcgagatatatcaaccgaaatctaccaagctggttctacaccttgtaatggtgtggagggatttaactgctacttccctcttcagtcctatggatttcagcctacaaatggagtcgggtatcaaccctatagagtcgtggtgttgtcatttgaacttctccatgcacctgctactgtctgtggtccaaaaaagtccactaatcttgtaaaaaacaaatgcgtgaacttcaatttcaatggcctcaccggaacaggtgttttgacagaatctaacaaaaaattccttcccttccagcaattcgggagagatatcgctgacacaaccgacgccgtaagagatccccagactcttgagatccttgacatcaccccatgcagttttggaggcgtgtctgtgatcacccctggcacaaacacctcaaaccaggtggctgtgctgtatcaagatgtcaattgcaccgaggtgcctgtggcaatacatgctgaccagctcaccccaacctggcgagtgtactctaccggatccggcggcggcggtgacggtggtggcggctccggagacaagacccacacctgccccccttgtcctgcccctgagctgctgggcggaccctccgtgtttctgttcccccccaagcccaaggacaccctgatgatcagccggacccccgaggtcacctgcgtggtggtggacgtcagccacgaggacccagaggtcaagttcaattggtatgtggacggcgtggaggtgcacaacgccaagaccaagccccgggaggaacagtacaacagcacctaccgggtggtgtccgtgctgaccgtgctgcaccaggactggctgaacggcaaagaatacaagtgcaaggtgtccaacaaggccctgcctgcccccatcgagaaaaccatcagcaaggccaagggccagcccagagaaccccaggtgtacaccctgccccctagcagggaagagctgaccaagaaccaggtgtccctgacctgtctggtcaagggcttctaccccagcgatatcgccgtggagtgggagagcaacggccagcctgagaacaactacaagaccaccccccctgtgctggacagcgacggcagcttcttcctgtacagcaagctgaccgtggacaagagccggtggcagcagggcaacgtgtttagctgcagcgtgatgcacgaggccctgcacaaccactacacccagaagagcttaagcctgtcccctggcagttga

SEQ ID NO: 101 - protein, 569 aa, synthetic construct
  REGION 1..569: note = LS2356 [CTD_long_b-Fc]
KGIYQTSNFRVQPTESIVRFPNITNLCPFGEVFNATRFASVYAWNRKRISNCVADYSVLYNSASFSTFKCYGVSPTKLNDLCFTNVYADSFVIRGDEVRQIAPGQTGKIADYNYKLPDDFTGCVIAWNSNNLDSKVGGNYNYLYRLFRKSNLKPFERDISTEIYQAGSTPCNGVEGFNCYFPLQSYGFQPTNGVGYQPYRVVVLSFELLHAPATVCGPKKSTNLVKNKCVNFNFNGLTGTGVLTESNKKFLPFQQFGRDIADTTDAVRDPQTLEILDITPCSFGGVSVITPGTNTSNQVAVLYQDVNCTEVPVAIHADQLTPTWRVYSTGSGGGGDGGGGSGDKTHTCPPCPAPELLGGPSVFLFPPKPKDTLMISRTPEVTCVVVDVSHEDPEVKFNWYVDGVEVHNAKTKPREEQYNSTYRVVSVLTVLHQDWLNGKEYKCKVSNKALPAPIEKTISKAKGQPREPQVYTLPPSREELTKNQVSLTCLVKGFYPSDIAVEWESNGQPENNYKTTPPVLDSDGSFFLYSKLTVDKSRWQQGNVFSCSVMHEALHNHYTQKSLSLSPGS

SEQ ID NO: 102 - DNA, 1710 bp, synthetic construct
  misc_feature 1..1710: note = LS2356 [CTD_long_b-Fc]
  source 1..1710: mol_type = other DNA
aaagggatctatcaaaccagcaattttagggttcagcccaccgaatcaatagtacggttcccaaatatcactaatctttgccccttcggggaagtatttaacgctactcgatttgctagcgtatatgcctggaaccggaagagaataagcaactgtgttgcagactatagcgtgctttacaattccgcatcctttagtaccttcaaatgttacggtgtgagccccaccaaactcaatgatctctgtttcacaaacgtgtacgcagatagtttcgttatacgcggggacgaagtacggcagatagcccctggccagacaggaaagatagccgattacaactacaaacttccagacgattttacagggtgtgtgatcgcttggaattcaaataacctggactccaaagtgggaggcaactataattacctgtaccgactgttccgcaaaagcaacttgaaacctttcgagcgagatatatcaaccgaaatctaccaagctggttctacaccttgtaatggtgtggagggatttaactgctacttccctcttcagtcctatggatttcagcctacaaatggagtcgggtatcaaccctatagagtcgtggtgttgtcatttgaacttctccatgcacctgctactgtctgtggtccaaaaaagtccactaatcttgtaaaaaacaaatgcgtgaacttcaatttcaatggcctcaccggaacaggtgttttgacagaatctaacaaaaaattccttcccttccagcaattcgggagagatatcgctgacacaaccgacgccgtaagagatccccagactcttgagatccttgacatcaccccatgcagttttggaggcgtgtctgtgatcacccctggcacaaacacctcaaaccaggtggctgtgctgtatcaagatgtcaattgcaccgaggtgcctgtggcaatacatgctgaccagctcaccccaacctggcgagtgtactctaccggatccggcggcggcggtgacggtggtggcggctccggagacaagacccacacctgccccccttgtcctgcccctgagctgctgggcggaccctccgtgtttctgttcccccccaagcccaaggacaccctgatgatcagccggacccccgaggtcacctgcgtggtggtggacgtcagccacgaggacccagaggtcaagttcaattggtatgtggacggcgtggaggtgcacaacgccaagaccaagccccgggaggaacagtacaacagcacctaccgggtggtgtccgtgctgaccgtgctgcaccaggactggctgaacggcaaagaatacaagtgcaaggtgtccaacaaggccctgcctgcccccatcgagaaaaccatcagcaaggccaagggccagcccagagaaccccaggtgtacaccctgccccctagcagggaagagctgaccaagaaccaggtgtccctgacctgtctggtcaagggcttctaccccagcgatatcgccgtggagtgggagagcaacggccagcctgagaacaactacaagaccaccccccctgtgctggacagcgacggcagcttcttcctgtacagcaagctgaccgtggacaagagccggtggcagcagggcaacgtgtttagctgcagcgtgatgcacgaggccctgcacaaccactacacccagaagagcttaagcctgtcccctggcagttga

SEQ ID NO: 103 - protein, 565 aa, synthetic construct
  REGION 1..565: note = LS2357 [CTD_long_c-Fc]
KGIYQTSNFRVQPTESIVRFPNITNLCPFGEVFNATRFASVYAWNRKRISNCVADYSVLYNSASFSTFKCYGVSPTKLNDLCFTNVYADSFVIRGDEVRQIAPGQTGKIADYNYKLPDDFTGCVIAWNSNNLDSKVGGNYNYLYRLFRKSNLKPFERDISTEIYQAGSTPCNGVEGFNCYFPLQSYGFQPTNGVGYQPYRVVVLSFELLHAPATVCGPKKSTNLVKNKCVNFNFNGLTGTGVLTESNKKFLPFQQFGRDIADTTDAVRDPQTLEILDITPCSFGGVSVITPGTNTSNQVAVLYQDVNCTEVPVAIHADQLTPTWRGSGGGGDGGGGSGDKTHTCPPCPAPELLGGPSVFLFPPKPKDTLMISRTPEVTCVVVDVSHEDPEVKFNWYVDGVEVHNAKTKPREEQYNSTYRVVSVLTVLHQDWLNGKEYKCKVSNKALPAPIEKTISKAKGQPREPQVYTLPPSREELTKNQVSLTCLVKGFYPSDIAVEWESNGQPENNYKTTPPVLDSDGSFFLYSKLTVDKSRWQQGNVFSCSVMHEALHNHYTQKSLSLSPGS

SEQ ID NO: 104 - DNA, 1698 bp, synthetic construct
  misc_feature 1..1698: note = LS2357 [CTD_long_c-Fc]
  source 1..1698: mol_type = other DNA
aaagggatctatcaaaccagcaattttagggttcagcccaccgaatcaatagtacggttcccaaatatcactaatctttgccccttcggggaagtatttaacgctactcgatttgctagcgtatatgcctggaaccggaagagaataagcaactgtgttgcagactatagcgtgctttacaattccgcatcctttagtaccttcaaatgttacggtgtgagccccaccaaactcaatgatctctgtttcacaaacgtgtacgcagatagtttcgttatacgcggggacgaagtacggcagatagcccctggccagacaggaaagatagccgattacaactacaaacttccagacgattttacagggtgtgtgatcgcttggaattcaaataacctggactccaaagtgggaggcaactataattacctgtaccgactgttccgcaaaagcaacttgaaacctttcgagcgagatatatcaaccgaaatctaccaagctggttctacaccttgtaatggtgtggagggatttaactgctacttccctcttcagtcctatggatttcagcctacaaatggagtcgggtatcaaccctatagagtcgtggtgttgtcatttgaacttctccatgcacctgctactgtctgtggtccaaaaaagtccactaatcttgtaaaaaacaaatgcgtgaacttcaatttcaatggcctcaccggaacaggtgttttgacagaatctaacaaaaaattccttcccttccagcaattcgggagagatatcgctgacacaaccgacgccgtaagagatccccagactcttgagatccttgacatcaccccatgcagttttggaggcgtgtctgtgatcacccctggcacaaacacctcaaaccaggtggctgtgctgtatcaagatgtcaattgcaccgaggtgcctgtggcaatacatgctgaccagctcaccccaacctggcgaggatccggcggcggcggtgacggtggtggcggctccggagacaagacccacacctgccccccttgtcctgcccctgagctgctgggcggaccctccgtgtttctgttcccccccaagcccaaggacaccctgatgatcagccggacccccgaggtcacctgcgtggtggtggacgtcagccacgaggacccagaggtcaagttcaattggtatgtggacggcgtggaggtgcacaacgccaagaccaagccccgggaggaacagtacaacagcacctaccgggtggtgtccgtgctgaccgtgctgcaccaggactggctgaacggcaaagaatacaagtgcaaggtgtccaacaaggccctgcctgcccccatcgagaaaaccatcagcaaggccaagggccagcccagagaaccccaggtgtacaccctgccccctagcagggaagagctgaccaagaaccaggtgtccctgacctgtctggtcaagggcttctaccccagcgatatcgccgtggagtgggagagcaacggccagcctgagaacaactacaagaccaccccccctgtgctggacagcgacggcagcttcttcctgtacagcaagctgaccgtggacaagagccggtggcagcagggcaacgtgtttagctgcagcgtgatgcacgaggccctgcacaaccactacacccagaagagcttaagcctgtcccctggcagttga

SEQ ID NO: 105 - protein, 550 aa, synthetic construct
  REGION 1..550: note = LS2358 [CTD_long_d-Fc]
KGIYQTSNFRVQPTESIVRFPNITNLCPFGEVFNATRFASVYAWNRKRISNCVADYSVLYNSASFSTFKCYGVSPTKLNDLCFTNVYADSFVIRGDEVRQIAPGQTGKIADYNYKLPDDFTGCVIAWNSNNLDSKVGGNYNYLYRLFRKSNLKPFERDISTEIYQAGSTPCNGVEGFNCYFPLQSYGFQPTNGVGYQPYRVVVLSFELLHAPATVCGPKKSTNLVKNKCVNFNFNGLTGTGVLTESNKKFLPFQQFGRDIADTTDAVRDPQTLEILDITPCSFGGVSVITPGTNTSNQVAVLYQDVNCTEGSGGGGDGGGGSGDKTHTCPPCPAPELLGGPSVFLFPPKPKDTLMISRTPEVTCVVVDVSHEDPEVKFNWYVDGVEVHNAKTKPREEQYNSTYRVVSVLTVLHQDWLNGKEYKCKVSNKALPAPIEKTISKAKGQPREPQVYTLPPSREELTKNQVSLTCLVKGFYPSDIAVEWESNGQPENNYKTTPPVLDSDGSFFLYSKLTVDKSRWQQGNVFSCSVMHEALHNHYTQKSLSLSPGS

SEQ ID NO: 106 - DNA, 1653 bp, synthetic construct
  misc_feature 1..1653: note = LS2358 [CTD_long_d-Fc]
  source 1..1653: mol_type = other DNA
aaagggatctatcaaaccagcaattttagggttcagcccaccgaatcaatagtacggttcccaaatatcactaatctttgccccttcggggaagtatttaacgctactcgatttgctagcgtatatgcctggaaccggaagagaataagcaactgtgttgcagactatagcgtgctttacaattccgcatcctttagtaccttcaaatgttacggtgtgagccccaccaaactcaatgatctctgtttcacaaacgtgtacgcagatagtttcgttatacgcggggacgaagtacggcagatagcccctggccagacaggaaagatagccgattacaactacaaacttccagacgattttacagggtgtgtgatcgcttggaattcaaataacctggactccaaagtgggaggcaactataattacctgtaccgactgttccgcaaaagcaacttgaaacctttcgagcgagatatatcaaccgaaatctaccaagctggttctacaccttgtaatggtgtggagggatttaactgctacttccctcttcagtcctatggatttcagcctacaaatggagtcgggtatcaaccctatagagtcgtggtgttgtcatttgaacttctccatgcacctgctactgtctgtggtccaaaaaagtccactaatcttgtaaaaaacaaatgcgtgaacttcaatttcaatggcctcaccggaacaggtgttttgacagaatctaacaaaaaattccttcccttccagcaattcgggagagatatcgctgacacaaccgacgccgtaagagatccccagactcttgagatccttgacatcaccccatgcagttttggaggcgtgtctgtgatcacccctggcacaaacacctcaaaccaggtggctgtgctgtatcaagatgtcaattgcaccgagggatccggcggcggcggtgacggtggtggcggctccggagacaagacccacacctgccccccttgtcctgcccctgagctgctgggcggaccctccgtgtttctgttcccccccaagcccaaggacaccctgatgatcagccggacccccgaggtcacctgcgtggtggtggacgtcagccacgaggacccagaggtcaagttcaattggtatgtggacggcgtggaggtgcacaacgccaagaccaagccccgggaggaacagtacaacagcacctaccgggtggtgtccgtgctgaccgtgctgcaccaggactggctgaacggcaaagaatacaagtgcaaggtgtccaacaaggccctgcctgcccccatcgagaaaaccatcagcaaggccaagggccagcccagagaaccccaggtgtacaccctgccccctagcagggaagagctgaccaagaaccaggtgtccctgacctgtctggtcaagggcttctaccccagcgatatcgccgtggagtgggagagcaacggccagcctgagaacaactacaagaccaccccccctgtgctggacagcgacggcagcttcttcctgtacagcaagctgaccgtggacaagagccggtggcagcagggcaacgtgtttagctgcagcgtgatgcacgaggccctgcacaaccactacacccagaagagcttaagcctgtcccctggcagttga

SEQ ID NO: 107 - protein, 538 aa, synthetic construct
  REGION 1..538: note = LS2359 [CTD_long_e-Fc]
KGIYQTSNFRVQPTESIVRFPNITNLCPFGEVFNATRFASVYAWNRKRISNCVADYSVLYNSASFSTFKCYGVSPTKLNDLCFTNVYADSFVIRGDEVRQIAPGQTGKIADYNYKLPDDFTGCVIAWNSNNLDSKVGGNYNYLYRLFRKSNLKPFERDISTEIYQAGSTPCNGVEGFNCYFPLQSYGFQPTNGVGYQPYRVVVLSFELLHAPATVCGPKKSTNLVKNKCVNFNFNGLTGTGVLTESNKKFLPFQQFGRDIADTTDAVRDPQTLEILDITPCSFGGVSVITPGTNTSNQGSGGGGDGGGGSGDKTHTCPPCPAPELLGGPSVFLFPPKPKDTLMISRTPEVTCVVVDVSHEDPEVKFNWYVDGVEVHNAKTKPREEQYNSTYRVVSVLTVLHQDWLNGKEYKCKVSNKALPAPIEKTISKAKGQPREPQVYTLPPSREELTKNQVSLTCLVKGFYPSDIAVEWESNGQPENNYKTTPPVLDSDGSFFLYSKLTVDKSRWQQGNVFSCSVMHEALHNHYTQKSLSLSPGS

SEQ ID NO: 108 - DNA, 1617 bp, synthetic construct
  misc_feature 1..1617: note = LS2359 [CTD_long_e-Fc]
  source 1..1617: mol_type = other DNA
aaagggatctatcaaaccagcaattttagggttcagcccaccgaatcaatagtacggttcccaaatatcactaatctttgccccttcggggaagtatttaacgctactcgatttgctagcgtatatgcctggaaccggaagagaataagcaactgtgttgcagactatagcgtgctttacaattccgcatcctttagtaccttcaaatgttacggtgtgagccccaccaaactcaatgatctctgtttcacaaacgtgtacgcagatagtttcgttatacgcggggacgaagtacggcagatagcccctggccagacaggaaagatagccgattacaactacaaacttccagacgattttacagggtgtgtgatcgcttggaattcaaataacctggactccaaagtgggaggcaactataattacctgtaccgactgttccgcaaaagcaacttgaaacctttcgagcgagatatatcaaccgaaatctaccaagctggttctacaccttgtaatggtgtggagggatttaactgctacttccctcttcagtcctatggatttcagcctacaaatggagtcgggtatcaaccctatagagtcgtggtgttgtcatttgaacttctccatgcacctgctactgtctgtggtccaaaaaagtccactaatcttgtaaaaaacaaatgcgtgaacttcaatttcaatggcctcaccggaacaggtgttttgacagaatctaacaaaaaattccttcccttccagcaattcgggagagatatcgctgacacaaccgacgccgtaagagatccccagactcttgagatccttgacatcaccccatgcagttttggaggcgtgtctgtgatcacccctggcacaaacacctcaaaccagggatccggcggcggcggtgacggtggtggcggctccggagacaagacccacacctgccccccttgtcctgcccctgagctgctgggcggaccctccgtgtttctgttcccccccaagcccaaggacaccctgatgatcagccggacccccgaggtcacctgcgtggtggtggacgtcagccacgaggacccagaggtcaagttcaattggtatgtggacggcgtggaggtgcacaacgccaagaccaagccccgggaggaacagtacaacagcacctaccgggtggtgtccgtgctgaccgtgctgcaccaggactggctgaacggcaaagaatacaagtgcaaggtgtccaacaaggccctgcctgcccccatcgagaaaaccatcagcaaggccaagggccagcccagagaaccccaggtgtacaccctgccccctagcagggaagagctgaccaagaaccaggtgtccctgacctgtctggtcaagggcttctaccccagcgatatcgccgtggagtgggagagcaacggccagcctgagaacaactacaagaccaccccccctgtgctggacagcgacggcagcttcttcctgtacagcaagctgaccgtggacaagagccggtggcagcagggcaacgtgtttagctgcagcgtgatgcacgaggccctgcacaaccactacacccagaagagcttaagcctgtcccctggcagttga

SEQ ID NO: 109 - protein, 533 aa, synthetic construct
  REGION 1..533: note = LS2360 [CTD_long_f-Fc]
KGIYQTSNFRVQPTESIVRFPNITNLCPFGEVFNATRFASVYAWNRKRISNCVADYSVLYNSASFSTFKCYGVSPTKLNDLCFTNVYADSFVIRGDEVRQIAPGQTGKIADYNYKLPDDFTGCVIAWNSNNLDSKVGGNYNYLYRLFRKSNLKPFERDISTEIYQAGSTPCNGVEGFNCYFPLQSYGFQPTNGVGYQPYRVVVLSFELLHAPATVCGPKKSTNLVKNKCVNFNFNGLTGTGVLTESNKKFLPFQQFGRDIADTTDAVRDPQTLEILDITPCSFGGVSVITPGTGSGGGGDGGGGSGDKTHTCPPCPAPELLGGPSVFLFPPKPKDTLMISRTPEVTCVVVDVSHEDPEVKFNWYVDGVEVHNAKTKPREEQYNSTYRVVSVLTVLHQDWLNGKEYKCKVSNKALPAPIEKTISKAKGQPREPQVYTLPPSREELTKNQVSLTCLVKGFYPSDIAVEWESNGQPENNYKTTPPVLDSDGSFFLYSKLTVDKSRWQQGNVFSCSVMHEALHNHYTQKSLSLSPGS

SEQ ID NO: 110 - DNA, 1602 bp, synthetic construct
  misc_feature 1..1602: note = LS2360 [CTD_long_f-Fc]
  source 1..1602: mol_type = other DNA
aaagggatctatcaaaccagcaattttagggttcagcccaccgaatcaatagtacggttcccaaatatcactaatctttgccccttcggggaagtatttaacgctactcgatttgctagcgtatatgcctggaaccggaagagaataagcaactgtgttgcagactatagcgtgctttacaattccgcatcctttagtaccttcaaatgttacggtgtgagccccaccaaactcaatgatctctgtttcacaaacgtgtacgcagatagtttcgttatacgcggggacgaagtacggcagatagcccctggccagacaggaaagatagccgattacaactacaaacttccagacgattttacagggtgtgtgatcgcttggaattcaaataacctggactccaaagtgggaggcaactataattacctgtaccgactgttccgcaaaagcaacttgaaacctttcgagcgagatatatcaaccgaaatctaccaagctggttctacaccttgtaatggtgtggagggatttaactgctacttccctcttcagtcctatggatttcagcctacaaatggagtcgggtatcaaccctatagagtcgtggtgttgtcatttgaacttctccatgcacctgctactgtctgtggtccaaaaaagtccactaatcttgtaaaaaacaaatgcgtgaacttcaatttcaatggcctcaccggaacaggtgttttgacagaatctaacaaaaaattccttcccttccagcaattcgggagagatatcgctgacacaaccgacgccgtaagagatccccagactcttgagatccttgacatcaccccatgcagttttggaggcgtgtctgtgatcacccctggcacaggatccggcggcggcggtgacggtggtggcggctccggagacaagacccacacctgccccccttgtcctgcccctgagctgctgggcggaccctccgtgtttctgttcccccccaagcccaaggacaccctgatgatcagccggacccccgaggtcacctgcgtggtggtggacgtcagccacgaggacccagaggtcaagttcaattggtatgtggacggcgtggaggtgcacaacgccaagaccaagccccgggaggaacagtacaacagcacctaccgggtggtgtccgtgctgaccgtgctgcaccaggactggctgaacggcaaagaatacaagtgcaaggtgtccaacaaggccctgcctgcccccatcgagaaaaccatcagcaaggccaagggccagcccagagaaccccaggtgtacaccctgccccctagcagggaagagctgaccaagaaccaggtgtccctgacctgtctggtcaagggcttctaccccagcgatatcgccgtggagtgggagagcaacggccagcctgagaacaactacaagaccaccccccctgtgctggacagcgacggcagcttcttcctgtacagcaagctgaccgtggacaagagccggtggcagcagggcaacgtgtttagctgcagcgtgatgcacgaggccctgcacaaccactacacccagaagagcttaagcctgtcccctggcagttga

SEQ ID NO: 111 - protein, 555 aa, synthetic construct
  REGION 1..555: note = LS2361 [CTD_long_g-Fc]
SFTVEKGIYQTSNFRVQPTESIVRFPNITNLCPFGEVFNATRFASVYAWNRKRISNCVADYSVLYNSASFSTFKCYGVSPTKLNDLCFTNVYADSFVIRGDEVRQIAPGQTGKIADYNYKLPDDFTGCVIAWNSNNLDSKVGGNYNYLYRLFRKSNLKPFERDISTEIYQAGSTPCNGVEGFNCYFPLQSYGFQPTNGVGYQPYRVVVLSFELLHAPATVCGPKKSTNLVKNKCVNFNFNGLTGTGVLTESNKKFLPFQQFGRDIADTTDAVRDPQTLEILDITPCSFGGVSVITPGTNTSNQVAVLYQDVNCTEGSGGGGDGGGGSGDKTHTCPPCPAPELLGGPSVFLFPPKPKDTLMISRTPEVTCVVVDVSHEDPEVKFNWYVDGVEVHNAKTKPREEQYNSTYRVVSVLTVLHQDWLNGKEYKCKVSNKALPAPIEKTISKAKGQPREPQVYTLPPSREELTKNQVSLTCLVKGFYPSDIAVEWESNGQPENNYKTTPPVLDSDGSFFLYSKLTVDKSRWQQGNVFSCSVMHEALHNHYTQKSLSLSPGS

SEQ ID NO: 112 - DNA, 1668 bp, synthetic construct
  misc_feature 1..1668: note = LS2361 [CTD_long_g-Fc]
  source 1..1668: mol_type = other DNA
tctttcactgtggagaaagggatctatcaaaccagcaattttagggttcagcccaccgaatcaatagtacggttcccaaatatcactaatctttgccccttcggggaagtatttaacgctactcgatttgctagcgtatatgcctggaaccggaagagaataagcaactgtgttgcagactatagcgtgctttacaattccgcatcctttagtaccttcaaatgttacggtgtgagccccaccaaactcaatgatctctgtttcacaaacgtgtacgcagatagtttcgttatacgcggggacgaagtacggcagatagcccctggccagacaggaaagatagccgattacaactacaaacttccagacgattttacagggtgtgtgatcgcttggaattcaaataacctggactccaaagtgggaggcaactataattacctgtaccgactgttccgcaaaagcaacttgaaacctttcgagcgagatatatcaaccgaaatctaccaagctggttctacaccttgtaatggtgtggagggatttaactgctacttccctcttcagtcctatggatttcagcctacaaatggagtcgggtatcaaccctatagagtcgtggtgttgtcatttgaacttctccatgcacctgctactgtctgtggtccaaaaaagtccactaatcttgtaaaaaacaaatgcgtgaacttcaatttcaatggcctcaccggaacaggtgttttgacagaatctaacaaaaaattccttcccttccagcaattcgggagagatatcgctgacacaaccgacgccgtaagagatccccagactcttgagatccttgacatcaccccatgcagttttggaggcgtgtctgtgatcacccctggcacaaacacctcaaaccaggtggctgtgctgtatcaagatgtcaattgcaccgagggatccggcggcggcggtgacggtggtggcggctccggagacaagacccacacctgccccccttgtcctgcccctgagctgctgggcggaccctccgtgtttctgttcccccccaagcccaaggacaccctgatgatcagccggacccccgaggtcacctgcgtggtggtggacgtcagccacgaggacccagaggtcaagttcaattggtatgtggacggcgtggaggtgcacaacgccaagaccaagccccgggaggaacagtacaacagcacctaccgggtggtgtccgtgctgaccgtgctgcaccaggactggctgaacggcaaagaatacaagtgcaaggtgtccaacaaggccctgcctgcccccatcgagaaaaccatcagcaaggccaagggccagcccagagaaccccaggtgtacaccctgccccctagcagggaagagctgaccaagaaccaggtgtccctgacctgtctggtcaagggcttctaccccagcgatatcgccgtggagtgggagagcaacggccagcctgagaacaactacaagaccaccccccctgtgctggacagcgacggcagcttcttcctgtacagcaagctgaccgtggacaagagccggtggcagcagggcaacgtgtttagctgcagcgtgatgcacgaggccctgcacaaccactacacccagaagagcttaagcctgtcccctggcagttga

SEQ ID NO: 113 - protein, 543 aa, synthetic construct
  REGION 1..543: note = LS2362 [CTD_long_h-Fc]
SFTVEKGIYQTSNFRVQPTESIVRFPNITNLCPFGEVFNATRFASVYAWNRKRISNCVADYSVLYNSASFSTFKCYGVSPTKLNDLCFTNVYADSFVIRGDEVRQIAPGQTGKIADYNYKLPDDFTGCVIAWNSNNLDSKVGGNYNYLYRLFRKSNLKPFERDISTEIYQAGSTPCNGVEGFNCYFPLQSYGFQPTNGVGYQPYRVVVLSFELLHAPATVCGPKKSTNLVKNKCVNFNFNGLTGTGVLTESNKKFLPFQQFGRDIADTTDAVRDPQTLEILDITPCSFGGVSVITPGTNTSNQGSGGGGDGGGGSGDKTHTCPPCPAPELLGGPSVFLFPPKPKDTLMISRTPEVTCVVVDVSHEDPEVKFNWYVDGVEVHNAKTKPREEQYNSTYRVVSVLTVLHQDWLNGKEYKCKVSNKALPAPIEKTISKAKGQPREPQVYTLPPSREELTKNQVSLTCLVKGFYPSDIAVEWESNGQPENNYKTTPPVLDSDGSFFLYSKLTVDKSRWQQGNVFSCSVMHEALHNHYTQKSLSLSPGS

SEQ ID NO: 114 - DNA, 1632 bp, synthetic construct
  misc_feature 1..1632: note = LS2362 [CTD_long_h-Fc]
  source 1..1632: mol_type = other DNA
tctttcactgtggagaaagggatctatcaaaccagcaattttagggttcagcccaccgaatcaatagtacggttcccaaatatcactaatctttgccccttcggggaagtatttaacgctactcgatttgctagcgtatatgcctggaaccggaagagaataagcaactgtgttgcagactatagcgtgctttacaattccgcatcctttagtaccttcaaatgttacggtgtgagccccaccaaactcaatgatctctgtttcacaaacgtgtacgcagatagtttcgttatacgcggggacgaagtacggcagatagcccctggccagacaggaaagatagccgattacaactacaaacttccagacgattttacagggtgtgtgatcgcttggaattcaaataacctggactccaaagtgggaggcaactataattacctgtaccgactgttccgcaaaagcaacttgaaacctttcgagcgagatatatcaaccgaaatctaccaagctggttctacaccttgtaatggtgtggagggatttaactgctacttccctcttcagtcctatggatttcagcctacaaatggagtcgggtatcaaccctatagagtcgtggtgttgtcatttgaacttctccatgcacctgctactgtctgtggtccaaaaaagtccactaatcttgtaaaaaacaaatgcgtgaacttcaatttcaatggcctcaccggaacaggtgttttgacagaatctaacaaaaaattccttcccttccagcaattcgggagagatatcgctgacacaaccgacgccgtaagagatccccagactcttgagatccttgacatcaccccatgcagttttggaggcgtgtctgtgatcacccctggcacaaacacctcaaaccagggatccggcggcggcggtgacggtggtggcggctccggagacaagacccacacctgccccccttgtcctgcccctgagctgctgggcggaccctccgtgtttctgttcccccccaagcccaaggacaccctgatgatcagccggacccccgaggtcacctgcgtggtggtggacgtcagccacgaggacccagaggtcaagttcaattggtatgtggacggcgtggaggtgcacaacgccaagaccaagccccgggaggaacagtacaacagcacctaccgggtggtgtccgtgctgaccgtgctgcaccaggactggctgaacggcaaagaatacaagtgcaaggtgtccaacaaggccctgcctgcccccatcgagaaaaccatcagcaaggccaagggccagcccagagaaccccaggtgtacaccctgccccctagcagggaagagctgaccaagaaccaggtgtccctgacctgtctggtcaagggcttctaccccagcgatatcgccgtggagtgggagagcaacggccagcctgagaacaactacaagaccaccccccctgtgctggacagcgacggcagcttcttcctgtacagcaagctgaccgtggacaagagccggtggcagcagggcaacgtgtttagctgcagcgtgatgcacgaggccctgcacaaccactacacccagaagagcttaagcctgtcccctggcagttga

SEQ ID NO: 115 - protein, 538 aa, synthetic construct
  REGION 1..538: note = LS2363 [CTD_long_i-Fc]
SFTVEKGIYQTSNFRVQPTESIVRFPNITNLCPFGEVFNATRFASVYAWNRKRISNCVADYSVLYNSASFSTFKCYGVSPTKLNDLCFTNVYADSFVIRGDEVRQIAPGQTGKIADYNYKLPDDFTGCVIAWNSNNLDSKVGGNYNYLYRLFRKSNLKPFERDISTEIYQAGSTPCNGVEGFNCYFPLQSYGFQPTNGVGYQPYRVVVLSFELLHAPATVCGPKKSTNLVKNKCVNFNFNGLTGTGVLTESNKKFLPFQQFGRDIADTTDAVRDPQTLEILDITPCSFGGVSVITPGTGSGGGGDGGGGSGDKTHTCPPCPAPELLGGPSVFLFPPKPKDTLMISRTPEVTCVVVDVSHEDPEVKFNWYVDGVEVHNAKTKPREEQYNSTYRVVSVLTVLHQDWLNGKEYKCKVSNKALPAPIEKTISKAKGQPREPQVYTLPPSREELTKNQVSLTCLVKGFYPSDIAVEWESNGQPENNYKTTPPVLDSDGSFFLYSKLTVDKSRWQQGNVFSCSVMHEALHNHYTQKSLSLSPGS

SEQ ID NO: 116 - DNA, 1617 bp, synthetic construct
  misc_feature 1..1617: note = LS2363 [CTD_long_i-Fc]
  source 1..1617: mol_type = other DNA
tctttcactgtggagaaagggatctatcaaaccagcaattttagggttcagcccaccgaatcaatagtacggttcccaaatatcactaatctttgccccttcggggaagtatttaacgctactcgatttgctagcgtatatgcctggaaccggaagagaataagcaactgtgttgcagactatagcgtgctttacaattccgcatcctttagtaccttcaaatgttacggtgtgagccccaccaaactcaatgatctctgtttcacaaacgtgtacgcagatagtttcgttatacgcggggacgaagtacggcagatagcccctggccagacaggaaagatagccgattacaactacaaacttccagacgattttacagggtgtgtgatcgcttggaattcaaataacctggactccaaagtgggaggcaactataattacctgtaccgactgttccgcaaaagcaacttgaaacctttcgagcgagatatatcaaccgaaatctaccaagctggttctacaccttgtaatggtgtggagggatttaactgctacttccctcttcagtcctatggatttcagcctacaaatggagtcgggtatcaaccctatagagtcgtggtgttgtcatttgaacttctccatgcacctgctactgtctgtggtccaaaaaagtccactaatcttgtaaaaaacaaatgcgtgaacttcaatttcaatggcctcaccggaacaggtgttttgacagaatctaacaaaaaattccttcccttccagcaattcgggagagatatcgctgacacaaccgacgccgtaagagatccccagactcttgagatccttgacatcaccccatgcagttttggaggcgtgtctgtgatcacccctggcacaggatccggcggcggcggtgacggtggtggcggctccggagacaagacccacacctgccccccttgtcctgcccctgagctgctgggcggaccctccgtgtttctgttcccccccaagcccaaggacaccctgatgatcagccggacccccgaggtcacctgcgtggtggtggacgtcagccacgaggacccagaggtcaagttcaattggtatgtggacggcgtggaggtgcacaacgccaagaccaagccccgggaggaacagtacaacagcacctaccgggtggtgtccgtgctgaccgtgctgcaccaggactggctgaacggcaaagaatacaagtgcaaggtgtccaacaaggccctgcctgcccccatcgagaaaaccatcagcaaggccaagggccagcccagagaaccccaggtgtacaccctgccccctagcagggaagagctgaccaagaaccaggtgtccctgacctgtctggtcaagggcttctaccccagcgatatcgccgtggagtgggagagcaacggccagcctgagaacaactacaagaccaccccccctgtgctggacagcgacggcagcttcttcctgtacagcaagctgaccgtggacaagagccggtggcagcagggcaacgtgtttagctgcagcgtgatgcacgaggccctgcacaaccactacacccagaagagcttaagcctgtcccctggcagttga

SEQ ID NO: 117 - protein, 501 aa, synthetic construct
  REGION 1..501: note = LS2364 [CTD_short_b-Fc]
NITNLCPFGEVFNATRFASVYAWNRKRISNCVADYSVLYNSASFSTFKCYGVSPTKLNDLCFTNVYADSFVIRGDEVRQIAPGQTGKIADYNYKLPDDFTGCVIAWNSNNLDSKVGGNYNYLYRLFRKSNLKPFERDISTEIYQAGSTPCNGVEGFNCYFPLQSYGFQPTNGVGYQPYRVVVLSFELLHAPATVCGPKKSTNLVKNKCVNFNFNGLTGTGVLTESNKKFLPFQQFGRDIADTTDAVRDPQTLEILDITPCSGSGGGGDGGGGSGDKTHTCPPCPAPELLGGPSVFLFPPKPKDTLMISRTPEVTCVVVDVSHEDPEVKFNWYVDGVEVHNAKTKPREEQYNSTYRVVSVLTVLHQDWLNGKEYKCKVSNKALPAPIEKTISKAKGQPREPQVYTLPPSREELTKNQVSLTCLVKGFYPSDIAVEWESNGQPENNYKTTPPVLDSDGSFFLYSKLTVDKSRWQQGNVFSCSVMHEALHNHYTQKSLSLSPGS

SEQ ID NO: 118 - DNA, 1506 bp, synthetic construct
  misc_feature 1..1506: note = LS2364 [CTD_short_b-Fc]
  source 1..1506: mol_type = other DNA
aatatcactaatctttgccccttcggggaagtatttaacgctactcgatttgctagcgtatatgcctggaaccggaagagaataagcaactgtgttgcagactatagcgtgctttacaattccgcatcctttagtaccttcaaatgttacggtgtgagccccaccaaactcaatgatctctgtttcacaaacgtgtacgcagatagtttcgttatacgcggggacgaagtacggcagatagcccctggccagacaggaaagatagccgattacaactacaaacttccagacgattttacagggtgtgtgatcgcttggaattcaaataacctggactccaaagtgggaggcaactataattacctgtaccgactgttccgcaaaagcaacttgaaacctttcgagcgagatatatcaaccgaaatctaccaagctggttctacaccttgtaatggtgtggagggatttaactgctacttccctcttcagtcctatggatttcagcctacaaatggagtcgggtatcaaccctatagagtcgtggtgttgtcatttgaacttctccatgcacctgctactgtctgtggtccaaaaaagtccactaatcttgtaaaaaacaaatgcgtgaacttcaatttcaatggcctcaccggaacaggtgttttgacagaatctaacaaaaaattccttcccttccagcaattcgggagagatatcgctgacacaaccgacgccgtaagagatccccagactcttgagatccttgacatcaccccatgcagtggatccggcggcggcggtgacggtggtggcggctccggagacaagacccacacctgccccccttgtcctgcccctgagctgctgggcggaccctccgtgtttctgttcccccccaagcccaaggacaccctgatgatcagccggacccccgaggtcacctgcgtggtggtggacgtcagccacgaggacccagaggtcaagttcaattggtatgtggacggcgtggaggtgcacaacgccaagaccaagccccgggaggaacagtacaacagcacctaccgggtggtgtccgtgctgaccgtgctgcaccaggactggctgaacggcaaagaatacaagtgcaaggtgtccaacaaggccctgcctgcccccatcgagaaaaccatcagcaaggccaagggccagcccagagaaccccaggtgtacaccctgccccctagcagggaagagctgaccaagaaccaggtgtccctgacctgtctggtcaagggcttctaccccagcgatatcgccgtggagtgggagagcaacggccagcctgagaacaactacaagaccaccccccctgtgctggacagcgacggcagcttcttcctgtacagcaagctgaccgtggacaagagccggtggcagcagggcaacgtgtttagctgcagcgtgatgcacgaggccctgcacaaccactacacccagaagagcttaagcctgtcccctggcagttga

SEQ ID NO: 119 - protein, 488 aa, synthetic construct
  REGION 1..488: note = LS2365 [CTD_short_c-Fc]
NITNLCPFGEVFNATRFASVYAWNRKRISNCVADYSVLYNSASFSTFKCYGVSPTKLNDLCFTNVYADSFVIRGDEVRQIAPGQTGKIADYNYKLPDDFTGCVIAWNSNNLDSKVGGNYNYLYRLFRKSNLKPFERDISTEIYQAGSTPCNGVEGFNCYFPLQSYGFQPTNGVGYQPYRVVVLSFELLHAPATVCGPKKSTNLVKNKCVNFNFNGLTGTGVLTESNKKFLPFQQFGRDIADTTDAVRDGSGGGGDGGGGSGDKTHTCPPCPAPELLGGPSVFLFPPKPKDTLMISRTPEVTCVVVDVSHEDPEVKFNWYVDGVEVHNAKTKPREEQYNSTYRVVSVLTVLHQDWLNGKEYKCKVSNKALPAPIEKTISKAKGQPREPQVYTLPPSREELTKNQVSLTCLVKGFYPSDIAVEWESNGQPENNYKTTPPVLDSDGSFFLYSKLTVDKSRWQQGNVFSCSVMHEALHNHYTQKSLSLSPGS

SEQ ID NO: 120 - DNA, 1467 bp, synthetic construct
  misc_feature 1..1467: note = LS2365 [CTD_short_c-Fc]
  source 1..1467: mol_type = other DNA
aatatcactaatctttgccccttcggggaagtatttaacgctactcgatttgctagcgtatatgcctggaaccggaagagaataagcaactgtgttgcagactatagcgtgctttacaattccgcatcctttagtaccttcaaatgttacggtgtgagccccaccaaactcaatgatctctgtttcacaaacgtgtacgcagatagtttcgttatacgcggggacgaagtacggcagatagcccctggccagacaggaaagatagccgattacaactacaaacttccagacgattttacagggtgtgtgatcgcttggaattcaaataacctggactccaaagtgggaggcaactataattacctgtaccgactgttccgcaaaagcaacttgaaacctttcgagcgagatatatcaaccgaaatctaccaagctggttctacaccttgtaatggtgtggagggatttaactgctacttccctcttcagtcctatggatttcagcctacaaatggagtcgggtatcaaccctatagagtcgtggtgttgtcatttgaacttctccatgcacctgctactgtctgtggtccaaaaaagtccactaatcttgtaaaaaacaaatgcgtgaacttcaatttcaatggcctcaccggaacaggtgttttgacagaatctaacaaaaaattccttcccttccagcaattcgggagagatatcgctgacacaaccgacgccgtaagagatggatccggcggcggcggtgacggtggtggcggctccggagacaagacccacacctgccccccttgtcctgcccctgagctgctgggcggaccctccgtgtttctgttcccccccaagcccaaggacaccctgatgatcagccggacccccgaggtcacctgcgtggtggtggacgtcagccacgaggacccagaggtcaagttcaattggtatgtggacggcgtggaggtgcacaacgccaagaccaagccccgggaggaacagtacaacagcacctaccgggtggtgtccgtgctgaccgtgctgcaccaggactggctgaacggcaaagaatacaagtgcaaggtgtccaacaaggccctgcctgcccccatcgagaaaaccatcagcaaggccaagggccagcccagagaaccccaggtgtacaccctgccccctagcagggaagagctgaccaagaaccaggtgtccctgacctgtctggtcaagggcttctaccccagcgatatcgccgtggagtgggagagcaacggccagcctgagaacaactacaagaccaccccccctgtgctggacagcgacggcagcttcttcctgtacagcaagctgaccgtggacaagagccggtggcagcagggcaacgtgtttagctgcagcgtgatgcacgaggccctgcacaaccactacacccagaagagcttaagcctgtcccctggcagttga

SEQ ID NO: 121 - protein, 478 aa, synthetic construct
  REGION 1..478: note = LS2366 [CTD_short_d-Fc]
NITNLCPFGEVFNATRFASVYAWNRKRISNCVADYSVLYNSASFSTFKCYGVSPTKLNDLCFTNVYADSFVIRGDEVRQIAPGQTGKIADYNYKLPDDFTGCVIAWNSNNLDSKVGGNYNYLYRLFRKSNLKPFERDISTEIYQAGSTPCNGVEGFNCYFPLQSYGFQPTNGVGYQPYRVVVLSFELLHAPATVCGPKKSTNLVKNKCVNFNFNGLTGTGVLTESNKKFLPFQQFGRDGSGGGGDGGGGSGDKTHTCPPCPAPELLGGPSVFLFPPKPKDTLMISRTPEVTCVVVDVSHEDPEVKFNWYVDGVEVHNAKTKPREEQYNSTYRVVSVLTVLHQDWLNGKEYKCKVSNKALPAPIEKTISKAKGQPREPQVYTLPPSREELTKNQVSLTCLVKGFYPSDIAVEWESNGQPENNYKTTPPVLDSDGSFFLYSKLTVDKSRWQQGNVFSCSVMHEALHNHYTQKSLSLSPGS

SEQ ID NO: 122 - DNA, 1437 bp, synthetic construct
  misc_feature 1..1437: note = LS2366 [CTD_short_d-Fc]
  source 1..1437: mol_type = other DNA
aatatcactaatctttgccccttcggggaagtatttaacgctactcgatttgctagcgtatatgcctggaaccggaagagaataagcaactgtgttgcagactatagcgtgctttacaattccgcatcctttagtaccttcaaatgttacggtgtgagccccaccaaactcaatgatctctgtttcacaaacgtgtacgcagatagtttcgttatacgcggggacgaagtacggcagatagcccctggccagacaggaaagatagccgattacaactacaaacttccagacgattttacagggtgtgtgatcgcttggaattcaaataacctggactccaaagtgggaggcaactataattacctgtaccgactgttccgcaaaagcaacttgaaacctttcgagcgagatatatcaaccgaaatctaccaagctggttctacaccttgtaatggtgtggagggatttaactgctacttccctcttcagtcctatggatttcagcctacaaatggagtcgggtatcaaccctatagagtcgtggtgttgtcatttgaacttctccatgcacctgctactgtctgtggtccaaaaaagtccactaatcttgtaaaaaacaaatgcgtgaacttcaatttcaatggcctcaccggaacaggtgttttgacagaatctaacaaaaaattccttcccttccagcaattcgggagagatggatccggcggcggcggtgacggtggtggcggctccggagacaagacccacacctgccccccttgtcctgcccctgagctgctgggcggaccctccgtgtttctgttcccccccaagcccaaggacaccctgatgatcagccggacccccgaggtcacctgcgtggtggtggacgtcagccacgaggacccagaggtcaagttcaattggtatgtggacggcgtggaggtgcacaacgccaagaccaagccccgggaggaacagtacaacagcacctaccgggtggtgtccgtgctgaccgtgctgcaccaggactggctgaacggcaaagaatacaagtgcaaggtgtccaacaaggccctgcctgcccccatcgagaaaaccatcagcaaggccaagggccagcccagagaaccccaggtgtacaccctgccccctagcagggaagagctgaccaagaaccaggtgtccctgacctgtctggtcaagggcttctaccccagcgatatcgccgtggagtgggagagcaacggccagcctgagaacaactacaagaccaccccccctgtgctggacagcgacggcagcttcttcctgtacagcaagctgaccgtggacaagagccggtggcagcagggcaacgtgtttagctgcagcgtgatgcacgaggccctgcacaaccactacacccagaagagcttaagcctgtcccctggcagttga

SEQ ID NO: 123 - protein, 465 aa, synthetic construct
  REGION 1..465: note = LS2367 [CTD_short_e-Fc]
NITNLCPFGEVFNATRFASVYAWNRKRISNCVADYSVLYNSASFSTFKCYGVSPTKLNDLCFTNVYADSFVIRGDEVRQIAPGQTGKIADYNYKLPDDFTGCVIAWNSNNLDSKVGGNYNYLYRLFRKSNLKPFERDISTEIYQAGSTPCNGVEGFNCYFPLQSYGFQPTNGVGYQPYRVVVLSFELLHAPATVCGPKKSTNLVKNKCVNFNFNGLTGTGVLTESGSGGGGDGGGGSGDKTHTCPPCPAPELLGGPSVFLFPPKPKDTLMISRTPEVTCVVVDVSHEDPEVKFNWYVDGVEVHNAKTKPREEQYNSTYRVVSVLTVLHQDWLNGKEYKCKVSNKALPAPIEKTISKAKGQPREPQVYTLPPSREELTKNQVSLTCLVKGFYPSDIAVEWESNGQPENNYKTTPPVLDSDGSFFLYSKLTVDKSRWQQGNVFSCSVMHEALHNHYTQKSLSLSPGS

SEQ ID NO: 124 - DNA, 1398 bp, synthetic construct
  misc_feature 1..1398: note = LS2367 [CTD_short_e-Fc]
  source 1..1398: mol_type = other DNA
aatatcactaatctttgccccttcggggaagtatttaacgctactcgatttgctagcgtatatgcctggaaccggaagagaataagcaactgtgttgcagactatagcgtgctttacaattccgcatcctttagtaccttcaaatgttacggtgtgagccccaccaaactcaatgatctctgtttcacaaacgtgtacgcagatagtttcgttatacgcggggacgaagtacggcagatagcccctggccagacaggaaagatagccgattacaactacaaacttccagacgattttacagggtgtgtgatcgcttggaattcaaataacctggactccaaagtgggaggcaactataattacctgtaccgactgttccgcaaaagcaacttgaaacctttcgagcgagatatatcaaccgaaatctaccaagctggttctacaccttgtaatggtgtggagggatttaactgctacttccctcttcagtcctatggatttcagcctacaaatggagtcgggtatcaaccctatagagtcgtggtgttgtcatttgaacttctccatgcacctgctactgtctgtggtccaaaaaagtccactaatcttgtaaaaaacaaatgcgtgaacttcaatttcaatggcctcaccggaacaggtgttttgacagaatctggatccggcggcggcggtgacggtggtggcggctccggagacaagacccacacctgccccccttgtcctgcccctgagctgctgggcggaccctccgtgtttctgttcccccccaagcccaaggacaccctgatgatcagccggacccccgaggtcacctgcgtggtggtggacgtcagccacgaggacccagaggtcaagttcaattggtatgtggacggcgtggaggtgcacaacgccaagaccaagccccgggaggaacagtacaacagcacctaccgggtggtgtccgtgctgaccgtgctgcaccaggactggctgaacggcaaagaatacaagtgcaaggtgtccaacaaggccctgcctgcccccatcgagaaaaccatcagcaaggccaagggccagcccagagaaccccaggtgtacaccctgccccctagcagggaagagctgaccaagaaccaggtgtccctgacctgtctggtcaagggcttctaccccagcgatatcgccgtggagtgggagagcaacggccagcctgagaacaactacaagaccaccccccctgtgctggacagcgacggcagcttcttcctgtacagcaagctgaccgtggacaagagccggtggcagcagggcaacgtgtttagctgcagcgtgatgcacgaggccctgcacaaccactacacccagaagagcttaagcctgtcccctggcagttga

SEQ ID NO: 125 - protein, 500 aa, synthetic construct
  REGION 1..500: note = LS2368 [CTD_short_f-Fc]
RVQPTESIVRFPNITNLCPFGEVFNATRFASVYAWNRKRISNCVADYSVLYNSASFSTFKCYGVSPTKLNDLCFTNVYADSFVIRGDEVRQIAPGQTGKIADYNYKLPDDFTGCVIAWNSNNLDSKVGGNYNYLYRLFRKSNLKPFERDISTEIYQAGSTPCNGVEGFNCYFPLQSYGFQPTNGVGYQPYRVVVLSFELLHAPATVCGPKKSTNLVKNKCVNFNFNGLTGTGVLTESNKKFLPFQQFGRDIADTTDAVRDGSGGGGDGGGGSGDKTHTCPPCPAPELLGGPSVFLFPPKPKDTLMISRTPEVTCVVVDVSHEDPEVKFNWYVDGVEVHNAKTKPREEQYNSTYRVVSVLTVLHQDWLNGKEYKCKVSNKALPAPIEKTISKAKGQPREPQVYTLPPSREELTKNQVSLTCLVKGFYPSDIAVEWESNGQPENNYKTTPPVLDSDGSFFLYSKLTVDKSRWQQGNVFSCSVMHEALHNHYTQKSLSLSPGS

SEQ ID NO: 126 - DNA, 1503 bp, synthetic construct
  misc_feature 1..1503: note = LS2368 [CTD_short_f-Fc]
  source 1..1503: mol_type = other DNA
agggttcagcccaccgaatcaatagtacggttcccaaatatcactaatctttgccccttcggggaagtatttaacgctactcgatttgctagcgtatatgcctggaaccggaagagaataagcaactgtgttgcagactatagcgtgctttacaattccgcatcctttagtaccttcaaatgttacggtgtgagccccaccaaactcaatgatctctgtttcacaaacgtgtacgcagatagtttcgttatacgcggggacgaagtacggcagatagcccctggccagacaggaaagatagccgattacaactacaaacttccagacgattttacagggtgtgtgatcgcttggaattcaaataacctggactccaaagtgggaggcaactataattacctgtaccgactgttccgcaaaagcaacttgaaacctttcgagcgagatatatcaaccgaaatctaccaagctggttctacaccttgtaatggtgtggagggatttaactgctacttccctcttcagtcctatggatttcagcctacaaatggagtcgggtatcaaccctatagagtcgtggtgttgtcatttgaacttctccatgcacctgctactgtctgtggtccaaaaaagtccactaatcttgtaaaaaacaaatgcgtgaacttcaatttcaatggcctcaccggaacaggtgttttgacagaatctaacaaaaaattccttcccttccagcaattcgggagagatatcgctgacacaaccgacgccgtaagagatggatccggcggcggcggtgacggtggtggcggctccggagacaagacccacacctgccccccttgtcctgcccctgagctgctgggcggaccctccgtgtttctgttcccccccaagcccaaggacaccctgatgatcagccggacccccgaggtcacctgcgtggtggtggacgtcagccacgaggacccagaggtcaagttcaattggtatgtggacggcgtggaggtgcacaacgccaagaccaagccccgggaggaacagtacaacagcacctaccgggtggtgtccgtgctgaccgtgctgcaccaggactggctgaacggcaaagaatacaagtgcaaggtgtccaacaaggccctgcctgcccccatcgagaaaaccatcagcaaggccaagggccagcccagagaaccccaggtgtacaccctgccccctagcagggaagagctgaccaagaaccaggtgtccctgacctgtctggtcaagggcttctaccccagcgatatcgccgtggagtgggagagcaacggccagcctgagaacaactacaagaccaccccccctgtgctggacagcgacggcagcttcttcctgtacagcaagctgaccgtggacaagagccggtggcagcagggcaacgtgtttagctgcagcgtgatgcacgaggccctgcacaaccactacacccagaagagcttaagcctgtcccctggcagttga

SEQ ID NO: 127 - protein, 490 aa, synthetic construct
  REGION 1..490: note = LS2369 [CTD_short_g-Fc]
RVQPTESIVRFPNITNLCPFGEVFNATRFASVYAWNRKRISNCVADYSVLYNSASFSTFKCYGVSPTKLNDLCFTNVYADSFVIRGDEVRQIAPGQTGKIADYNYKLPDDFTGCVIAWNSNNLDSKVGGNYNYLYRLFRKSNLKPFERDISTEIYQAGSTPCNGVEGFNCYFPLQSYGFQPTNGVGYQPYRVVVLSFELLHAPATVCGPKKSTNLVKNKCVNFNFNGLTGTGVLTESNKKFLPFQQFGRDGSGGGGDGGGGSGDKTHTCPPCPAPELLGGPSVFLFPPKPKDTLMISRTPEVTCVVVDVSHEDPEVKFNWYVDGVEVHNAKTKPREEQYNSTYRVVSVLTVLHQDWLNGKEYKCKVSNKALPAPIEKTISKAKGQPREPQVYTLPPSREELTKNQVSLTCLVKGFYPSDIAVEWESNGQPENNYKTTPPVLDSDGSFFLYSKLTVDKSRWQQGNVFSCSVMHEALHNHYTQKSLSLSPGS

SEQ ID NO: 128 - DNA, 1473 bp, synthetic construct
  misc_feature 1..1473: note = LS2369 [CTD_short_g-Fc]
  source 1..1473: mol_type = other DNA
agggttcagcccaccgaatcaatagtacggttcccaaatatcactaatctttgccccttcggggaagtatttaacgctactcgatttgctagcgtatatgcctggaaccggaagagaataagcaactgtgttgcagactatagcgtgctttacaattccgcatcctttagtaccttcaaatgttacggtgtgagccccaccaaactcaatgatctctgtttcacaaacgtgtacgcagatagtttcgttatacgcggggacgaagtacggcagatagcccctggccagacaggaaagatagccgattacaactacaaacttccagacgattttacagggtgtgtgatcgcttggaattcaaataacctggactccaaagtgggaggcaactataattacctgtaccgactgttccgcaaaagcaacttgaaacctttcgagcgagatatatcaaccgaaatctaccaagctggttctacaccttgtaatggtgtggagggatttaactgctacttccctcttcagtcctatggatttcagcctacaaatggagtcgggtatcaaccctatagagtcgtggtgttgtcatttgaacttctccatgcacctgctactgtctgtggtccaaaaaagtccactaatcttgtaaaaaacaaatgcgtgaacttcaatttcaatggcctcaccggaacaggtgttttgacagaatctaacaaaaaattccttcccttccagcaattcgggagagatggatccggcggcggcggtgacggtggtggcggctccggagacaagacccacacctgccccccttgtcctgcccctgagctgctgggcggaccctccgtgtttctgttcccccccaagcccaaggacaccctgatgatcagccggacccccgaggtcacctgcgtggtggtggacgtcagccacgaggacccagaggtcaagttcaattggtatgtggacggcgtggaggtgcacaacgccaagaccaagccccgggaggaacagtacaacagcacctaccgggtggtgtccgtgctgaccgtgctgcaccaggactggctgaacggcaaagaatacaagtgcaaggtgtccaacaaggccctgcctgcccccatcgagaaaaccatcagcaaggccaagggccagcccagagaaccccaggtgtacaccctgccccctagcagggaagagctgaccaagaaccaggtgtccctgacctgtctggtcaagggcttctaccccagcgatatcgccgtggagtgggagagcaacggccagcctgagaacaactacaagaccaccccccctgtgctggacagcgacggcagcttcttcctgtacagcaagctgaccgtggacaagagccggtggcagcagggcaacgtgtttagctgcagcgtgatgcacgaggccctgcacaaccactacacccagaagagcttaagcctgtcccctggcagttga

SEQ ID NO: 129 - protein, 477 aa, synthetic construct
  REGION 1..477: note = LS2370 [CTD_short_h-Fc]
RVQPTESIVRFPNITNLCPFGEVFNATRFASVYAWNRKRISNCVADYSVLYNSASFSTFKCYGVSPTKLNDLCFTNVYADSFVIRGDEVRQIAPGQTGKIADYNYKLPDDFTGCVIAWNSNNLDSKVGGNYNYLYRLFRKSNLKPFERDISTEIYQAGSTPCNGVEGFNCYFPLQSYGFQPTNGVGYQPYRVVVLSFELLHAPATVCGPKKSTNLVKNKCVNFNFNGLTGTGVLTESGSGGGGDGGGGSGDKTHTCPPCPAPELLGGPSVFLFPPKPKDTLMISRTPEVTCVVVDVSHEDPEVKFNWYVDGVEVHNAKTKPREEQYNSTYRVVSVLTVLHQDWLNGKEYKCKVSNKALPAPIEKTISKAKGQPREPQVYTLPPSREELTKNQVSLTCLVKGFYPSDIAVEWESNGQPENNYKTTPPVLDSDGSFFLYSKLTVDKSRWQQGNVFSCSVMHEALHNHYTQKSLSLSPGS

SEQ ID NO: 130 - DNA, 1434 bp, synthetic construct
  misc_feature 1..1434: note = LS2370 [CTD_short_h-Fc]
  source 1..1434: mol_type = other DNA
agggttcagcccaccgaatcaatagtacggttcccaaatatcactaatctttgccccttcggggaagtatttaacgctactcgatttgctagcgtatatgcctggaaccggaagagaataagcaactgtgttgcagactatagcgtgctttacaattccgcatcctttagtaccttcaaatgttacggtgtgagccccaccaaactcaatgatctctgtttcacaaacgtgtacgcagatagtttcgttatacgcggggacgaagtacggcagatagcccctggccagacaggaaagatagccgattacaactacaaacttccagacgattttacagggtgtgtgatcgcttggaattcaaataacctggactccaaagtgggaggcaactataattacctgtaccgactgttccgcaaaagcaacttgaaacctttcgagcgagatatatcaaccgaaatctaccaagctggttctacaccttgtaatggtgtggagggatttaactgctacttccctcttcagtcctatggatttcagcctacaaatggagtcgggtatcaaccctatagagtcgtggtgttgtcatttgaacttctccatgcacctgctactgtctgtggtccaaaaaagtccactaatcttgtaaaaaacaaatgcgtgaacttcaatttcaatggcctcaccggaacaggtgttttgacagaatctggatccggcggcggcggtgacggtggtggcggctccggagacaagacccacacctgccccccttgtcctgcccctgagctgctgggcggaccctccgtgtttctgttcccccccaagcccaaggacaccctgatgatcagccggacccccgaggtcacctgcgtggtggtggacgtcagccacgaggacccagaggtcaagttcaattggtatgtggacggcgtggaggtgcacaacgccaagaccaagccccgggaggaacagtacaacagcacctaccgggtggtgtccgtgctgaccgtgctgcaccaggactggctgaacggcaaagaatacaagtgcaaggtgtccaacaaggccctgcctgcccccatcgagaaaaccatcagcaaggccaagggccagcccagagaaccccaggtgtacaccctgccccctagcagggaagagctgaccaagaaccaggtgtccctgacctgtctggtcaagggcttctaccccagcgatatcgccgtggagtgggagagcaacggccagcctgagaacaactacaagaccaccccccctgtgctggacagcgacggcagcttcttcctgtacagcaagctgaccgtggacaagagccggtggcagcagggcaacgtgtttagctgcagcgtgatgcacgaggccctgcacaaccactacacccagaagagcttaagcctgtcccctggcagttga

SEQ ID NO: 131 - protein, 447 aa, synthetic construct
  REGION 1..447: note = LS2371 [CTD_short_i-Fc]
NITNLCPFGEVFNATRFASVYAWNRKRISNCVADYSVLYNSASFSTFKCYGVSPTKLNDLCFTNVYADSFVIRGDEVRQIAPGQTGKIADYNYKLPDDFTGCVIAWNSNNLDSKVGGNYNYLYRLFRKSNLKPFERDISTEIYQAGSTPCNGVEGFNCYFPLQSYGFQPTNGVGYQPYRVVVLSFELLHAPATVCGPKKSTNLVKNKGSGGGGDGGGGSGDKTHTCPPCPAPELLGGPSVFLFPPKPKDTLMISRTPEVTCVVVDVSHEDPEVKFNWYVDGVEVHNAKTKPREEQYNSTYRVVSVLTVLHQDWLNGKEYKCKVSNKALPAPIEKTISKAKGQPREPQVYTLPPSREELTKNQVSLTCLVKGFYPSDIAVEWESNGQPENNYKTTPPVLDSDGSFFLYSKLTVDKSRWQQGNVFSCSVMHEALHNHYTQKSLSLSPGS

SEQ ID NO: 132 - DNA, 1344 bp, synthetic construct
  misc_feature 1..1344: note = LS2371 [CTD_short_i-Fc]
  source 1..1344: mol_type = other DNA
aatatcactaatctttgccccttcggggaagtatttaacgctactcgatttgctagcgtatatgcctggaaccggaagagaataagcaactgtgttgcagactatagcgtgctttacaattccgcatcctttagtaccttcaaatgttacggtgtgagccccaccaaactcaatgatctctgtttcacaaacgtgtacgcagatagtttcgttatacgcggggacgaagtacggcagatagcccctggccagacaggaaagatagccgattacaactacaaacttccagacgattttacagggtgtgtgatcgcttggaattcaaataacctggactccaaagtgggaggcaactataattacctgtaccgactgttccgcaaaagcaacttgaaacctttcgagcgagatatatcaaccgaaatctaccaagctggttctacaccttgtaatggtgtggagggatttaactgctacttccctcttcagtcctatggatttcagcctacaaatggagtcgggtatcaaccctatagagtcgtggtgttgtcatttgaacttctccatgcacctgctactgtctgtggtccaaaaaagtccactaatcttgtaaaaaacaaaggatccggcggcggcggtgacggtggtggcggctccggagacaagacccacacctgccccccttgtcctgcccctgagctgctgggcggaccctccgtgtttctgttcccccccaagcccaaggacaccctgatgatcagccggacccccgaggtcacctgcgtggtggtggacgtcagccacgaggacccagaggtcaagttcaattggtatgtggacggcgtggaggtgcacaacgccaagaccaagccccgggaggaacagtacaacagcacctaccgggtggtgtccgtgctgaccgtgctgcaccaggactggctgaacggcaaagaatacaagtgcaaggtgtccaacaaggccctgcctgcccccatcgagaaaaccatcagcaaggccaagggccagcccagagaaccccaggtgtacaccctgccccctagcagggaagagctgaccaagaaccaggtgtccctgacctgtctggtcaagggcttctaccccagcgatatcgccgtggagtgggagagcaacggccagcctgagaacaactacaagaccaccccccctgtgctggacagcgacggcagcttcttcctgtacagcaagctgaccgtggacaagagccggtggcagcagggcaacgtgtttagctgcagcgtgatgcacgaggccctgcacaaccactacacccagaagagcttaagcctgtcccctggcagttga

SEQ ID NO: 133 - protein, 400 aa, synthetic construct
  REGION 1..400: note = LS2372 [CTD_veryshort_a-Fc]
SASFSTFKCYGVSPTKLNDLCFTNVYADSFVIRGDEVRQIAPGQTGKIADYNYKLPDDFTGCVIAWNSNNLDSKVGGNYNYLYRLFRKSNLKPFERDISTEIYQAGSTPCNGVEGFNCYFPLQSYGFQPTNGVGYQPYRVVVLSFELLHAPATVCGPKKSGSGGGGDGGGGSGDKTHTCPPCPAPELLGGPSVFLFPPKPKDTLMISRTPEVTCVVVDVSHEDPEVKFNWYVDGVEVHNAKTKPREEQYNSTYRVVSVLTVLHQDWLNGKEYKCKVSNKALPAPIEKTISKAKGQPREPQVYTLPPSREELTKNQVSLTCLVKGFYPSDIAVEWESNGQPENNYKTTPPVLDSDGSFFLYSKLTVDKSRWQQGNVFSCSVMHEALHNHYTQKSLSLSPGS

SEQ ID NO: 134 - DNA, 1203 bp, synthetic construct
  misc_feature 1..1203: note = LS2372 [CTD_veryshort_a-Fc]
  source 1..1203: mol_type = other DNA
tccgcatcctttagtaccttcaaatgttacggtgtgagccccaccaaactcaatgatctctgtttcacaaacgtgtacgcagatagtttcgttatacgcggggacgaagtacggcagatagcccctggccagacaggaaagatagccgattacaactacaaacttccagacgattttacagggtgtgtgatcgcttggaattcaaataacctggactccaaagtgggaggcaactataattacctgtaccgactgttccgcaaaagcaacttgaaacctttcgagcgagatatatcaaccgaaatctaccaagctggttctacaccttgtaatggtgtggagggatttaactgctacttccctcttcagtcctatggatttcagcctacaaatggagtcgggtatcaaccctatagagtcgtggtgttgtcatttgaacttctccatgcacctgctactgtctgtggtccaaaaaagtccggatccggcggcggcggtgacggtggtggcggctccggagacaagacccacacctgccccccttgtcctgcccctgagctgctgggcggaccctccgtgtttctgttcccccccaagcccaaggacaccctgatgatcagccggacccccgaggtcacctgcgtggtggtggacgtcagccacgaggacccagaggtcaagttcaattggtatgtggacggcgtggaggtgcacaacgccaagaccaagccccgggaggaacagtacaacagcacctaccgggtggtgtccgtgctgaccgtgctgcaccaggactggctgaacggcaaagaatacaagtgcaaggtgtccaacaaggccctgcctgcccccatcgagaaaaccatcagcaaggccaagggccagcccagagaaccccaggtgtacaccctgccccctagcagggaagagctgaccaagaaccaggtgtccctgacctgtctggtcaagggcttctaccccagcgatatcgccgtggagtgggagagcaacggccagcctgagaacaactacaagaccaccccccctgtgctggacagcgacggcagcttcttcctgtacagcaagctgaccgtggacaagagccggtggcagcagggcaacgtgtttagctgcagcgtgatgcacgaggccctgcacaaccactacacccagaagagcttaagcctgtcccctggcagttga

SEQ ID NO: 135 - protein, 396 aa, synthetic construct
  REGION 1..396: note = LS2373 [CTD_veryshort_b-Fc]
STFKCYGVSPTKLNDLCFTNVYADSFVIRGDEVRQIAPGQTGKIADYNYKLPDDFTGCVIAWNSNNLDSKVGGNYNYLYRLFRKSNLKPFERDISTEIYQAGSTPCNGVEGFNCYFPLQSYGFQPTNGVGYQPYRVVVLSFELLHAPATVCGPKKSGSGGGGDGGGGSGDKTHTCPPCPAPELLGGPSVFLFPPKPKDTLMISRTPEVTCVVVDVSHEDPEVKFNWYVDGVEVHNAKTKPREEQYNSTYRVVSVLTVLHQDWLNGKEYKCKVSNKALPAPIEKTISKAKGQPREPQVYTLPPSREELTKNQVSLTCLVKGFYPSDIAVEWESNGQPENNYKTTPPVLDSDGSFFLYSKLTVDKSRWQQGNVFSCSVMHEALHNHYTQKSLSLSPGS

SEQ ID NO: 136 - DNA, 1191 bp, synthetic construct
  misc_feature 1..1191: note = LS2373 [CTD_veryshort_b-Fc]
  source 1..1191: mol_type = other DNA
agtaccttcaaatgttacggtgtgagccccaccaaactcaatgatctctgtttcacaaacgtgtacgcagatagtttcgttatacgcggggacgaagtacggcagatagcccctggccagacaggaaagatagccgattacaactacaaacttccagacgattttacagggtgtgtgatcgcttggaattcaaataacctggactccaaagtgggaggcaactataattacctgtaccgactgttccgcaaaagcaacttgaaacctttcgagcgagatatatcaaccgaaatctaccaagctggttctacaccttgtaatggtgtggagggatttaactgctacttccctcttcagtcctatggatttcagcctacaaatggagtcgggtatcaaccctatagagtcgtggtgttgtcatttgaacttctccatgcacctgctactgtctgtggtccaaaaaagtccggatccggcggcggcggtgacggtggtggcggctccggagacaagacccacacctgccccccttgtcctgcccctgagctgctgggcggaccctccgtgtttctgttcccccccaagcccaaggacaccctgatgatcagccggacccccgaggtcacctgcgtggtggtggacgtcagccacgaggacccagaggtcaagttcaattggtatgtggacggcgtggaggtgcacaacgccaagaccaagccccgggaggaacagtacaacagcacctaccgggtggtgtccgtgctgaccgtgctgcaccaggactggctgaacggcaaagaatacaagtgcaaggtgtccaacaaggccctgcctgcccccatcgagaaaaccatcagcaaggccaagggccagcccagagaaccccaggtgtacaccctgccccctagcagggaagagctgaccaagaaccaggtgtccctgacctgtctggtcaagggcttctaccccagcgatatcgccgtggagtgggagagcaacggccagcctgagaacaactacaagaccaccccccctgtgctggacagcgacggcagcttcttcctgtacagcaagctgaccgtggacaagagccggtggcagcagggcaacgtgtttagctgcagcgtgatgcacgaggccctgcacaaccactacacccagaagagcttaagcctgtcccctggcagttga

SEQ ID NO: 137 - protein, 396 aa, synthetic construct
  REGION 1..396: note = LS2374 [CTD_veryshort_c-Fc]
SASFSTFKCYGVSPTKLNDLCFTNVYADSFVIRGDEVRQIAPGQTGKIADYNYKLPDDFTGCVIAWNSNNLDSKVGGNYNYLYRLFRKSNLKPFERDISTEIYQAGSTPCNGVEGFNCYFPLQSYGFQPTNGVGYQPYRVVVLSFELLHAPATVCGGSGGGGDGGGGSGDKTHTCPPCPAPELLGGPSVFLFPPKPKDTLMISRTPEVTCVVVDVSHEDPEVKFNWYVDGVEVHNAKTKPREEQYNSTYRVVSVLTVLHQDWLNGKEYKCKVSNKALPAPIEKTISKAKGQPREPQVYTLPPSREELTKNQVSLTCLVKGFYPSDIAVEWESNGQPENNYKTTPPVLDSDGSFFLYSKLTVDKSRWQQGNVFSCSVMHEALHNHYTQKSLSLSPGS

SEQ ID NO: 138 - DNA, 1191 bp, synthetic construct
  misc_feature 1..1191: note = LS2374 [CTD_veryshort_c-Fc]
  source 1..1191: mol_type = other DNA
tccgcatcctttagtaccttcaaatgttacggtgtgagccccaccaaactcaatgatctctgtttcacaaacgtgtacgcagatagtttcgttatacgcggggacgaagtacggcagatagcccctggccagacaggaaagatagccgattacaactacaaacttccagacgattttacagggtgtgtgatcgcttggaattcaaataacctggactccaaagtgggaggcaactataattacctgtaccgactgttccgcaaaagcaacttgaaacctttcgagcgagatatatcaaccgaaatctaccaagctggttctacaccttgtaatggtgtggagggatttaactgctacttccctcttcagtcctatggatttcagcctacaaatggagtcgggtatcaaccctatagagtcgtggtgttgtcatttgaacttctccatgcacctgctactgtctgtggtggatccggcggcggcggtgacggtggtggcggctccggagacaagacccacacctgccccccttgtcctgcccctgagctgctgggcggaccctccgtgtttctgttcccccccaagcccaaggacaccctgatgatcagccggacccccgaggtcacctgcgtggtggtggacgtcagccacgaggacccagaggtcaagttcaattggtatgtggacggcgtggaggtgcacaacgccaagaccaagccccgggaggaacagtacaacagcacctaccgggtggtgtccgtgctgaccgtgctgcaccaggactggctgaacggcaaagaatacaagtgcaaggtgtccaacaaggccctgcctgcccccatcgagaaaaccatcagcaaggccaagggccagcccagagaaccccaggtgtacaccctgccccctagcagggaagagctgaccaagaaccaggtgtccctgacctgtctggtcaagggcttctaccccagcgatatcgccgtggagtgggagagcaacggccagcctgagaacaactacaagaccaccccccctgtgctggacagcgacggcagcttcttcctgtacagcaagctgaccgtggacaagagccggtggcagcagggcaacgtgtttagctgcagcgtgatgcacgaggccctgcacaaccactacacccagaagagcttaagcctgtcccctggcagttga

SEQ ID NO: 139 - protein, 407 aa, synthetic construct
  REGION 1..407: note = LS2375 [CTD_veryshort_d-Fc]
DYSVLYNSASFSTFKCYGVSPTKLNDLCFTNVYADSFVIRGDEVRQIAPGQTGKIADYNYKLPDDFTGCVIAWNSNNLDSKVGGNYNYLYRLFRKSNLKPFERDISTEIYQAGSTPCNGVEGFNCYFPLQSYGFQPTNGVGYQPYRVVVLSFELLHAPATVCGPKKSGSGGGGDGGGGSGDKTHTCPPCPAPELLGGPSVFLFPPKPKDTLMISRTPEVTCVVVDVSHEDPEVKFNWYVDGVEVHNAKTKPREEQYNSTYRVVSVLTVLHQDWLNGKEYKCKVSNKALPAPIEKTISKAKGQPREPQVYTLPPSREELTKNQVSLTCLVKGFYPSDIAVEWESNGQPENNYKTTPPVLDSDGSFFLYSKLTVDKSRWQQGNVFSCSVMHEALHNHYTQKSLSLSPGS

SEQ ID NO: 140 - DNA, 1224 bp, synthetic construct
  misc_feature 1..1224: note = LS2375 [CTD_veryshort_d-Fc]
  source 1..1224: mol_type = other DNA
gactatagcgtgctttacaattccgcatcctttagtaccttcaaatgttacggtgtgagccccaccaaactcaatgatctctgtttcacaaacgtgtacgcagatagtttcgttatacgcggggacgaagtacggcagatagcccctggccagacaggaaagatagccgattacaactacaaacttccagacgattttacagggtgtgtgatcgcttggaattcaaataacctggactccaaagtgggaggcaactataattacctgtaccgactgttccgcaaaagcaacttgaaacctttcgagcgagatatatcaaccgaaatctaccaagctggttctacaccttgtaatggtgtggagggatttaactgctacttccctcttcagtcctatggatttcagcctacaaatggagtcgggtatcaaccctatagagtcgtggtgttgtcatttgaacttctccatgcacctgctactgtctgtggtccaaaaaagtccggatccggcggcggcggtgacggtggtggcggctccggagacaagacccacacctgccccccttgtcctgcccctgagctgctgggcggaccctccgtgtttctgttcccccccaagcccaaggacaccctgatgatcagccggacccccgaggtcacctgcgtggtggtggacgtcagccacgaggacccagaggtcaagttcaattggtatgtggacggcgtggaggtgcacaacgccaagaccaagccccgggaggaacagtacaacagcacctaccgggtggtgtccgtgctgaccgtgctgcaccaggactggctgaacggcaaagaatacaagtgcaaggtgtccaacaaggccctgcctgcccccatcgagaaaaccatcagcaaggccaagggccagcccagagaaccccaggtgtacaccctgccccctagcagggaagagctgaccaagaaccaggtgtccctgacctgtctggtcaagggcttctaccccagcgatatcgccgtggagtgggagagcaacggccagcctgagaacaactacaagaccaccccccctgtgctggacagcgacggcagcttcttcctgtacagcaagctgaccgtggacaagagccggtggcagcagggcaacgtgtttagctgcagcgtgatgcacgaggccctgcacaaccactacacccagaagagcttaagcctgtcccctggcagttga

SEQ ID NO: 141 - protein, 403 aa, synthetic construct
  REGION 1..403: note = LS2376 [CTD_veryshort_e-Fc]
DYSVLYNSASFSTFKCYGVSPTKLNDLCFTNVYADSFVIRGDEVRQIAPGQTGKIADYNYKLPDDFTGCVIAWNSNNLDSKVGGNYNYLYRLFRKSNLKPFERDISTEIYQAGSTPCNGVEGFNCYFPLQSYGFQPTNGVGYQPYRVVVLSFELLHAPATVCGGSGGGGDGGGGSGDKTHTCPPCPAPELLGGPSVFLFPPKPKDTLMISRTPEVTCVVVDVSHEDPEVKFNWYVDGVEVHNAKTKPREEQYNSTYRVVSVLTVLHQDWLNGKEYKCKVSNKALPAPIEKTISKAKGQPREPQVYTLPPSREELTKNQVSLTCLVKGFYPSDIAVEWESNGQPENNYKTTPPVLDSDGSFFLYSKLTVDKSRWQQGNVFSCSVMHEALHNHYTQKSLSLSPGS

SEQ ID NO: 142 - DNA, 1212 bp, synthetic construct
  misc_feature 1..1212: note = LS2376 [CTD_veryshort_e-Fc]
  source 1..1212: mol_type = other DNA
gactatagcgtgctttacaattccgcatcctttagtaccttcaaatgttacggtgtgagccccaccaaactcaatgatctctgtttcacaaacgtgtacgcagatagtttcgttatacgcggggacgaagtacggcagatagcccctggccagacaggaaagatagccgattacaactacaaacttccagacgattttacagggtgtgtgatcgcttggaattcaaataacctggactccaaagtgggaggcaactataattacctgtaccgactgttccgcaaaagcaacttgaaacctttcgagcgagatatatcaaccgaaatctaccaagctggttctacaccttgtaatggtgtggagggatttaactgctacttccctcttcagtcctatggatttcagcctacaaatggagtcgggtatcaaccctatagagtcgtggtgttgtcatttgaacttctccatgcacctgctactgtctgtggtggatccggcggcggcggtgacggtggtggcggctccggagacaagacccacacctgccccccttgtcctgcccctgagctgctgggcggaccctccgtgtttctgttcccccccaagcccaaggacaccctgatgatcagccggacccccgaggtcacctgcgtggtggtggacgtcagccacgaggacccagaggtcaagttcaattggtatgtggacggcgtggaggtgcacaacgccaagaccaagccccgggaggaacagtacaacagcacctaccgggtggtgtccgtgctgaccgtgctgcaccaggactggctgaacggcaaagaatacaagtgcaaggtgtccaacaaggccctgcctgcccccatcgagaaaaccatcagcaaggccaagggccagcccagagaaccccaggtgtacaccctgccccctagcagggaagagctgaccaagaaccaggtgtccctgacctgtctggtcaagggcttctaccccagcgatatcgccgtggagtgggagagcaacggccagcctgagaacaactacaagaccaccccccctgtgctggacagcgacggcagcttcttcctgtacagcaagctgaccgtggacaagagccggtggcagcagggcaacgtgtttagctgcagcgtgatgcacgaggccctgcacaaccactacacccagaagagcttaagcctgtcccctggcagttga

SEQ ID NO: 143 - protein, 310 aa, synthetic construct
  REGION 1..310: note = LS2377 [RBD_a-Fc]
NSNNLDSKVGGNYNYLYRLFRKSNLKPFERDISTEIYQAGSTPCNGVEGFNCYFPLQSYGFQPTNGVGYQGSGGGGDGGGGSGDKTHTCPPCPAPELLGGPSVFLFPPKPKDTLMISRTPEVTCVVVDVSHEDPEVKFNWYVDGVEVHNAKTKPREEQYNSTYRVVSVLTVLHQDWLNGKEYKCKVSNKALPAPIEKTISKAKGQPREPQVYTLPPSREELTKNQVSLTCLVKGFYPSDIAVEWESNGQPENNYKTTPPVLDSDGSFFLYSKLTVDKSRWQQGNVFSCSVMHEALHNHYTQKSLSLSPGS

SEQ ID NO: 144 - DNA, 933 bp, synthetic construct
  misc_feature 1..933: note = LS2377 [RBD_a-Fc]
  source 1..933: mol_type = other DNA
aattcaaataacctggactccaaagtgggaggcaactataattacctgtaccgactgttccgcaaaagcaacttgaaacctttcgagcgagatatatcaaccgaaatctaccaagctggttctacaccttgtaatggtgtggagggatttaactgctacttccctcttcagtcctatggatttcagcctacaaatggagtcgggtatcaaggatccggcggcggcggtgacggtggtggcggctccggagacaagacccacacctgccccccttgtcctgcccctgagctgctgggcggaccctccgtgtttctgttcccccccaagcccaaggacaccctgatgatcagccggacccccgaggtcacctgcgtggtggtggacgtcagccacgaggacccagaggtcaagttcaattggtatgtggacggcgtggaggtgcacaacgccaagaccaagccccgggaggaacagtacaacagcacctaccgggtggtgtccgtgctgaccgtgctgcaccaggactggctgaacggcaaagaatacaagtgcaaggtgtccaacaaggccctgcctgcccccatcgagaaaaccatcagcaaggccaagggccagcccagagaaccccaggtgtacaccctgccccctagcagggaagagctgaccaagaaccaggtgtccctgacctgtctggtcaagggcttctaccccagcgatatcgccgtggagtgggagagcaacggccagcctgagaacaactacaagaccaccccccctgtgctggacagcgacggcagcttcttcctgtacagcaagctgaccgtggacaagagccggtggcagcagggcaacgtgtttagctgcagcgtgatgcacgaggccctgcacaaccactacacccagaagagcttaagcctgtcccctggcagttga

SEQ ID NO: 145 - protein, 362 aa, synthetic construct
  REGION 1..362: note = LS2378 [RBD_b-Fc]
TKLNDLCFTNVYADSFVIRGDEVRQIAPGQTGKIADYNYKLPDDFTGCVIAWNSNNLDSKVGGNYNYLYRLFRKSNLKPFERDISTEIYQAGSTPCNGVEGFNCYFPLQSYGFQPTNGVGYQGSGGGGDGGGGSGDKTHTCPPCPAPELLGGPSVFLFPPKPKDTLMISRTPEVTCVVVDVSHEDPEVKFNWYVDGVEVHNAKTKPREEQYNSTYRVVSVLTVLHQDWLNGKEYKCKVSNKALPAPIEKTISKAKGQPREPQVYTLPPSREELTKNQVSLTCLVKGFYPSDIAVEWESNGQPENNYKTTPPVLDSDGSFFLYSKLTVDKSRWQQGNVFSCSVMHEALHNHYTQKSLSLSPGS

SEQ ID NO: 146 - DNA, 1089 bp, synthetic construct
  misc_feature 1..1089: note = LS2378 [RBD_b-Fc]
  source 1..1089: mol_type = other DNA
accaaactcaatgatctctgtttcacaaacgtgtacgcagatagtttcgttatacgcggggacgaagtacggcagatagcccctggccagacaggaaagatagccgattacaactacaaacttccagacgattttacagggtgtgtgatcgcttggaattcaaataacctggactccaaagtgggaggcaactataattacctgtaccgactgttccgcaaaagcaacttgaaacctttcgagcgagatatatcaaccgaaatctaccaagctggttctacaccttgtaatggtgtggagggatttaactgctacttccctcttcagtcctatggatttcagcctacaaatggagtcgggtatcaaggatccggcggcggcggtgacggtggtggcggctccggagacaagacccacacctgccccccttgtcctgcccctgagctgctgggcggaccctccgtgtttctgttcccccccaagcccaaggacaccctgatgatcagccggacccccgaggtcacctgcgtggtggtggacgtcagccacgaggacccagaggtcaagttcaattggtatgtggacggcgtggaggtgcacaacgccaagaccaagccccgggaggaacagtacaacagcacctaccgggtggtgtccgtgctgaccgtgctgcaccaggactggctgaacggcaaagaatacaagtgcaaggtgtccaacaaggccctgcctgcccccatcgagaaaaccatcagcaaggccaagggccagcccagagaaccccaggtgtacaccctgccccctagcagggaagagctgaccaagaaccaggtgtccctgacctgtctggtcaagggcttctaccccagcgatatcgccgtggagtgggagagcaacggccagcctgagaacaactacaagaccaccccccctgtgctggacagcgacggcagcttcttcctgtacagcaagctgaccgtggacaagagccggtggcagcagggcaacgtgtttagctgcagcgtgatgcacgaggccctgcacaaccactacacccagaagagcttaagcctgtcccctggcagttga

SEQ ID NO: 147 - protein, 320 aa, synthetic construct
  REGION 1..320: note = LS2379 [RBD_c-Fc]
NSNNLDSKVGGNYNYLYRLFRKSNLKPFERDISTEIYQAGSTPCNGVEGFNCYFPLQSYGFQPTNGVGYQPYRVVVLSFEGSGGGGDGGGGSGDKTHTCPPCPAPELLGGPSVFLFPPKPKDTLMISRTPEVTCVVVDVSHEDPEVKFNWYVDGVEVHNAKTKPREEQYNSTYRVVSVLTVLHQDWLNGKEYKCKVSNKALPAPIEKTISKAKGQPREPQVYTLPPSREELTKNQVSLTCLVKGFYPSDIAVEWESNGQPENNYKTTPPVLDSDGSFFLYSKLTVDKSRWQQGNVFSCSVMHEALHNHYTQKSLSLSPGS

SEQ ID NO: 148 - DNA, 963 bp, synthetic construct
  misc_feature 1..963: note = LS2379 [RBD_c-Fc]
  source 1..963: mol_type = other DNA
aattcaaataacctggactccaaagtgggaggcaactataattacctgtaccgactgttccgcaaaagcaacttgaaacctttcgagcgagatatatcaaccgaaatctaccaagctggttctacaccttgtaatggtgtggagggatttaactgctacttccctcttcagtcctatggatttcagcctacaaatggagtcgggtatcaaccctatagagtcgtggtgttgtcatttgaaggatccggcggcggcggtgacggtggtggcggctccggagacaagacccacacctgccccccttgtcctgcccctgagctgctgggcggaccctccgtgtttctgttcccccccaagcccaaggacaccctgatgatcagccggacccccgaggtcacctgcgtggtggtggacgtcagccacgaggacccagaggtcaagttcaattggtatgtggacggcgtggaggtgcacaacgccaagaccaagccccgggaggaacagtacaacagcacctaccgggtggtgtccgtgctgaccgtgctgcaccaggactggctgaacggcaaagaatacaagtgcaaggtgtccaacaaggccctgcctgcccccatcgagaaaaccatcagcaaggccaagggccagcccagagaaccccaggtgtacaccctgccccctagcagggaagagctgaccaagaaccaggtgtccctgacctgtctggtcaagggcttctaccccagcgatatcgccgtggagtgggagagcaacggccagcctgagaacaactacaagaccaccccccctgtgctggacagcgacggcagcttcttcctgtacagcaagctgaccgtggacaagagccggtggcagcagggcaacgtgtttagctgcagcgtgatgcacgaggccctgcacaaccactacacccagaagagcttaagcctgtcccctggcagttga

SEQ ID NO: 149 - protein, 298 aa, synthetic construct
  REGION 1..298: note = LS2380 [RBD_d-Fc]
GVSPTKLNDLCFTNVYADSFVIRGDEVRQIAPGQTGKIADYNYKLPDDFTGCVIAWNSGSGGGGDGGGGSGDKTHTCPPCPAPELLGGPSVFLFPPKPKDTLMISRTPEVTCVVVDVSHEDPEVKFNWYVDGVEVHNAKTKPREEQYNSTYRVVSVLTVLHQDWLNGKEYKCKVSNKALPAPIEKTISKAKGQPREPQVYTLPPSREELTKNQVSLTCLVKGFYPSDIAVEWESNGQPENNYKTTPPVLDSDGSFFLYSKLTVDKSRWQQGNVFSCSVMHEALHNHYTQKSLSLSPGS

SEQ ID NO: 150 - DNA, 897 bp, synthetic construct
  misc_feature 1..897: note = LS2380 [RBD_d-Fc]
  source 1..897: mol_type = other DNA
ggtgtgagccccaccaaactcaatgatctctgtttcacaaacgtgtacgcagatagtttcgttatacgcggggacgaagtacggcagatagcccctggccagacaggaaagatagccgattacaactacaaacttccagacgattttacagggtgtgtgatcgcttggaattcaggatccggcggcggcggtgacggtggtggcggctccggagacaagacccacacctgccccccttgtcctgcccctgagctgctgggcggaccctccgtgtttctgttcccccccaagcccaaggacaccctgatgatcagccggacccccgaggtcacctgcgtggtggtggacgtcagccacgaggacccagaggtcaagttcaattggtatgtggacggcgtggaggtgcacaacgccaagaccaagccccgggaggaacagtacaacagcacctaccgggtggtgtccgtgctgaccgtgctgcaccaggactggctgaacggcaaagaatacaagtgcaaggtgtccaacaaggccctgcctgcccccatcgagaaaaccatcagcaaggccaagggccagcccagagaaccccaggtgtacaccctgccccctagcagggaagagctgaccaagaaccaggtgtccctgacctgtctggtcaagggcttctaccccagcgatatcgccgtggagtgggagagcaacggccagcctgagaacaactacaagaccaccccccctgtgctggacagcgacggcagcttcttcctgtacagcaagctgaccgtggacaagagccggtggcagcagggcaacgtgtttagctgcagcgtgatgcacgaggccctgcacaaccactacacccagaagagcttaagcctgtcccctggcagttga

SEQ ID NO: 151 - protein, 316 aa, synthetic construct
  REGION 1..316: note = LS2381 [RBD_e-Fc]
IAWNSNNLDSKVGGNYNYLYRLFRKSNLKPFERDISTEIYQAGSTPCNGVEGFNCYFPLQSYGFQPTNGVGYQPYRGSGGGGDGGGGSGDKTHTCPPCPAPELLGGPSVFLFPPKPKDTLMISRTPEVTCVVVDVSHEDPEVKFNWYVDGVEVHNAKTKPREEQYNSTYRVVSVLTVLHQDWLNGKEYKCKVSNKALPAPIEKTISKAKGQPREPQVYTLPPSREELTKNQVSLTCLVKGFYPSDIAVEWESNGQPENNYKTTPPVLDSDGSFFLYSKLTVDKSRWQQGNVFSCSVMHEALHNHYTQKSLSLSPGS

SEQ ID NO: 152 - DNA, 951 bp, synthetic construct
  misc_feature 1..951: note = LS2381 [RBD_e-Fc]
  source 1..951: mol_type = other DNA
atcgcttggaattcaaataacctggactccaaagtgggaggcaactataattacctgtaccgactgttccgcaaaagcaacttgaaacctttcgagcgagatatatcaaccgaaatctaccaagctggttctacaccttgtaatggtgtggagggatttaactgctacttccctcttcagtcctatggatttcagcctacaaatggagtcgggtatcaaccctatagaggatccggcggcggcggtgacggtggtggcggctccggagacaagacccacacctgccccccttgtcctgcccctgagctgctgggcggaccctccgtgtttctgttcccccccaagcccaaggacaccctgatgatcagccggacccccgaggtcacctgcgtggtggtggacgtcagccacgaggacccagaggtcaagttcaattggtatgtggacggcgtggaggtgcacaacgccaagaccaagccccgggaggaacagtacaacagcacctaccgggtggtgtccgtgctgaccgtgctgcaccaggactggctgaacggcaaagaatacaagtgcaaggtgtccaacaaggccctgcctgcccccatcgagaaaaccatcagcaaggccaagggccagcccagagaaccccaggtgtacaccctgccccctagcagggaagagctgaccaagaaccaggtgtccctgacctgtctggtcaagggcttctaccccagcgatatcgccgtggagtgggagagcaacggccagcctgagaacaactacaagaccaccccccctgtgctggacagcgacggcagcttcttcctgtacagcaagctgaccgtggacaagagccggtggcagcagggcaacgtgtttagctgcagcgtgatgcacgaggccctgcacaaccactacacccagaagagcttaagcctgtcccctggcagttga

SEQ ID NO: 153 - protein, 504 aa, synthetic construct
  REGION 1..504: note = LS2382 [NTD_short_a-Fc]
RGVYYPDKVFRSSVLHSTQDLFLPFFSNVTWFHAIHVSGTNGTKRFDNPVLPFNDGVYFASTEKSNIIRGWIFGTTLDSKTQSLLIVNNATNVVIKVCEFQFCNDPFLGVYYHKNNKSWMESEFRVYSSANNCTFEYVSQPFLMDLEGKQGNFKNLREFVFKNIDGYFKIYSKHTPINLVRDLPQGFSALEPLVDLPIGINITRFQTLLALHRSYLTPGDSSSGWTAGAAAYYVGYLQPRTFLLKYNENGTITDAVDCALDPLSGSGGGGDGGGGSGDKTHTCPPCPAPELLGGPSVFLFPPKPKDTLMISRTPEVTCVVVDVSHEDPEVKFNWYVDGVEVHNAKTKPREEQYNSTYRVVSVLTVLHQDWLNGKEYKCKVSNKALPAPIEKTISKAKGQPREPQVYTLPPSREELTKNQVSLTCLVKGFYPSDIAVEWESNGQPENNYKTTPPVLDSDGSFFLYSKLTVDKSRWQQGNVFSCSVMHEALHNHYTQKSLSLSPGS

SEQ ID NO: 154 - DNA, 1515 bp, synthetic construct
  misc_feature 1..1515: note = LS2382 [NTD_short_a-Fc]
  source 1..1515: mol_type = other DNA
cgtggtgtatactaccccgataaggtttttcgctcttccgtgctccatagtacacaggatctcttcctgccattcttcagtaatgtcacctggtttcatgctattcatgtgtctggaactaatggaaccaagcgctttgataatccagtactcccttttaatgacggagtttacttcgcaagcacagaaaagtccaatatcatacgcgggtggattttcggaactaccctcgactccaagactcaatcactccttatagtcaataacgccaccaatgtggtcatcaaagtctgtgaatttcaattttgcaacgacccattcctgggcgtctactatcataaaaacaataagagctggatggaatccgaatttagagtatacagttctgctaataattgcacattcgaatatgtatcccaacccttccttatggatttggagggcaagcaaggcaatttcaaaaacttgcgggaatttgtcttcaaaaacatagatgggtacttcaaaatttatagtaagcatacacctattaacttggttcgagacttgcctcagggcttcagcgcccttgaacctcttgtggatttgccaatcggcatcaatataacacgatttcagacactcttggcactgcatcgttcctacctgactccaggagactctagctctggttggacagcaggcgccgctgcttactatgtcggctacttgcaacctcgaacattccttctcaaatataacgaaaatggaactatcacagatgccgtggattgtgccttggaccctctctcaggatccggcggcggcggtgacggtggtggcggctccggagacaagacccacacctgccccccttgtcctgcccctgagctgctgggcggaccctccgtgtttctgttcccccccaagcccaaggacaccctgatgatcagccggacccccgaggtcacctgcgtggtggtggacgtcagccacgaggacccagaggtcaagttcaattggtatgtggacggcgtggaggtgcacaacgccaagaccaagccccgggaggaacagtacaacagcacctaccgggtggtgtccgtgctgaccgtgctgcaccaggactggctgaacggcaaagaatacaagtgcaaggtgtccaacaaggccctgcctgcccccatcgagaaaaccatcagcaaggccaagggccagcccagagaaccccaggtgtacaccctgccccctagcagggaagagctgaccaagaaccaggtgtccctgacctgtctggtcaagggcttctaccccagcgatatcgccgtggagtgggagagcaacggccagcctgagaacaactacaagaccaccccccctgtgctggacagcgacggcagcttcttcctgtacagcaagctgaccgtggacaagagccggtggcagcagggcaacgtgtttagctgcagcgtgatgcacgaggccctgcacaaccactacacccagaagagcttaagcctgtcccctggcagttga

SEQ ID NO: 155 - protein, 404 aa, synthetic construct
  REGION 1..404: note = LS2393 [(RBD-tight)2-Fc]
GDEMGTIAWNSNNLDSKVGGNYNYLYRLFRKSNLKPFERDISTEIYQAGSTPCNGVEGFNCYFPLQSYGFQPTNGVGYQPYRSGGGGSIAWNSNNLDSKVGGNYNYLYRLFRKSNLKPFERDISTEIYQAGSTPCNGVEGFNCYFPLQSYGFQPTNGVGYQPYRGSGGGGDGGGGSGDKTHTCPPCPAPELLGGPSVFLFPPKPKDTLMISRTPEVTCVVVDVSHEDPEVKFNWYVDGVEVHNAKTKPREEQYNSTYRVVSVLTVLHQDWLNGKEYKCKVSNKALPAPIEKTISKAKGQPREPQVYTLPPSREELTKNQVSLTCLVKGFYPSDIAVEWESNGQPENNYKTTPPVLDSDGSFFLYSKLTVDKSRWQQGNVFSCSVMHEALHNHYTQKSLSLSPGS

SEQ ID NO: 156 - DNA, 1215 bp, synthetic construct
  misc_feature 1..1215: note = LS2393 [(RBD-tight)2-Fc]
  source 1..1215: mol_type = other DNA
ggcgatgagatgggtaccatcgcatggaacagcaacaacctggatagcaaagtgggcggcaactataattacctgtatcgactcttcagaaagagtaatctgaagcctttcgaaagggatatcagtactgaaatatatcaggctggcagtactccttgcaatggagtagagggctttaactgttatttcccacttcagtcatacggttttcagcccaccaacggagtcggctatcagccttacagatcagggggcggaggaagtatcgcatggaactccaataatctcgacagcaaagtcggaggcaattacaattatctgtataggctcttcagaaaaagtaacctcaagccgttcgaacgggatatcagcactgagatataccaagccgggagtacaccctgtaacggagtcgagggctttaactgttacttccctctacagtcctatggctttcagcccaccaatggcgttgggtatcagccttatagaggatccggcggcggcggtgacggtggtggcggctccggagacaagacccacacctgccccccttgtcctgcccctgagctgctgggcggaccctccgtgtttctgttcccccccaagcccaaggacaccctgatgatcagccggacccccgaggtcacctgcgtggtggtggacgtcagccacgaggacccagaggtcaagttcaattggtatgtggacggcgtggaggtgcacaacgccaagaccaagccccgggaggaacagtacaacagcacctaccgggtggtgtccgtgctgaccgtgctgcaccaggactggctgaacggcaaagaatacaagtgcaaggtgtccaacaaggccctgcctgcccccatcgagaaaaccatcagcaaggccaagggccagcccagagaaccccaggtgtacaccctgccccctagcagggaagagctgaccaagaaccaggtgtccctgacctgtctggtcaagggcttctaccccagcgatatcgccgtggagtgggagagcaacggccagcctgagaacaactacaagaccaccccccctgtgctggacagcgacggcagcttcttcctgtacagcaagctgaccgtggacaagagccggtggcagcagggcaacgtgtttagctgcagcgtgatgcacgaggccctgcacaaccactacacccagaagagcttaagcctgtcccctggcagttga

SEQ ID NO: 157 - protein, 430 aa, synthetic construct
  REGION 1..430: note = LS2394 [(RBD-extended)2-Fc]
GDEMGTIAWNSNNLDSKVGGNYNYLYRLFRKSNLKPFERDISTEIYQAGSTPCNGVEGFNCYFPLQSYGFQPTNGVGYQPYRVVVLSFELLHAPATGGGSIAWNSNNLDSKVGGNYNYLYRLFRKSNLKPFERDISTEIYQAGSTPCNGVEGFNCYFPLQSYGFQPTNGVGYQPYRVVVLSFELLHAPATGSGGGGDGGGGSGDKTHTCPPCPAPELLGGPSVFLFPPKPKDTLMISRTPEVTCVVVDVSHEDPEVKFNWYVDGVEVHNAKTKPREEQYNSTYRVVSVLTVLHQDWLNGKEYKCKVSNKALPAPIEKTISKAKGQPREPQVYTLPPSREELTKNQVSLTCLVKGFYPSDIAVEWESNGQPENNYKTTPPVLDSDGSFFLYSKLTVDKSRWQQGNVFSCSVMHEALHNHYTQKSLSLSPGS

SEQ ID NO: 158 - DNA, 1293 bp, synthetic construct
  misc_feature 1..1293: note = LS2394 [(RBD-extended)2-Fc]
  source 1..1293: mol_type = other DNA
ggcgatgagatgggtaccattgcatggaattcaaacaacctggattccaaggtcggtggtaattacaactatctatacagactgttccgaaagagcaacttgaaaccctttgaacgtgatatctccacagaaatttatcaggccggttccaccccttgcaacggcgttgagggttttaactgctattttccgctgcagagctacggttttcagccaactaatggagttggatatcaaccttaccgggtggttgtgctatccttcgaattgctccatgctcctgctaccggtggcggcagcatcgcatggaacagcaataatttggatagtaaagtgggcgggaattataactacctgtaccggctgttcagaaagagcaatctgaaaccttttgagcgggacatttccactgagatctaccaggccggcagcaccccctgtaacggagtcgaaggattcaattgttacttcccacttcaaagctatggattccaacctacaaatggggtcggctatcaaccatatcgcgttgtggtcttgtcctttgagcttttgcatgcccctgccactggatccggcggcggcggtgacggtggtggcggctccggagacaagacccacacctgccccccttgtcctgcccctgagctgctgggcggaccctccgtgtttctgttcccccccaagcccaaggacaccctgatgatcagccggacccccgaggtcacctgcgtggtggtggacgtcagccacgaggacccagaggtcaagttcaattggtatgtggacggcgtggaggtgcacaacgccaagaccaagccccgggaggaacagtacaacagcacctaccgggtggtgtccgtgctgaccgtgctgcaccaggactggctgaacggcaaagaatacaagtgcaaggtgtccaacaaggccctgcctgcccccatcgagaaaaccatcagcaaggccaagggccagcccagagaaccccaggtgtacaccctgccccctagcagggaagagctgaccaagaaccaggtgtccctgacctgtctggtcaagggcttctaccccagcgatatcgccgtggagtgggagagcaacggccagcctgagaacaactacaagaccaccccccctgtgctggacagcgacggcagcttcttcctgtacagcaagctgaccgtggacaagagccggtggcagcagggcaacgtgtttagctgcagcgtgatgcacgaggccctgcacaaccactacacccagaagagcttaagcctgtcccctggcagttga

SEQ ID NO: 159 - protein, 404 aa, synthetic construct; identical to SEQ ID NO: 155
  REGION 1..404: note = LS2395 [(RBD)2-Fc]

SEQ ID NO: 160 - DNA, 1215 bp, synthetic construct
  misc_feature 1..1215: note = LS2395 [(RBD)2-Fc]
  source 1..1215: mol_type = other DNA
ggcgatgagatgggtaccatcgcttggaactccaacaatctggactccaaagtgggcggaaattacaattatctgtatcgcctcttccgtaagtctaacctcaagccttttgagagagacatctccactgagatatatcaggccggatcaactccctgtaacggtgtagaagggttcaattgctatttcccactgcagagttacggttttcagcccactaatggcgttggataccaaccctacaggtcaggaggcgggggatctattgcctggaactcaaataatctcgattctaaggttggcggtaactataattatctctatcggctgttccgcaaatccaaccttaaaccctttgagcgtgatataagtactgagatttaccaagcagggagcaccccctgcaatggcgtggaagggttcaactgctacttccccctccaaagctatggatttcagccaactaacggcgttggttaccagccctatagaggatccggcggcggcggtgacggtggtggcggctccggagacaagacccacacctgccccccttgtcctgcccctgagctgctgggcggaccctccgtgtttctgttcccccccaagcccaaggacaccctgatgatcagccggacccccgaggtcacctgcgtggtggtggacgtcagccacgaggacccagaggtcaagttcaattggtatgtggacggcgtggaggtgcacaacgccaagaccaagccccgggaggaacagtacaacagcacctaccgggtggtgtccgtgctgaccgtgctgcaccaggactggctgaacggcaaagaatacaagtgcaaggtgtccaacaaggccctgcctgcccccatcgagaaaaccatcagcaaggccaagggccagcccagagaaccccaggtgtacaccctgccccctagcagggaagagctgaccaagaaccaggtgtccctgacctgtctggtcaagggcttctaccccagcgatatcgccgtggagtgggagagcaacggccagcctgagaacaactacaagaccaccccccctgtgctggacagcgacggcagcttcttcctgtacagcaagctgaccgtggacaagagccggtggcagcagggcaacgtgtttagctgcagcgtgatgcacgaggccctgcacaaccactacacccagaagagcttaagcctgtcccctggcagttga

SEQ ID NO: 161 - protein, 734 aa, synthetic construct
  REGION 1..734: note = LS2397-2400 [(CTD_short_d)2-Fc]
GDEMGTNITNLCPFGEVFNATRFASVYAWNRKRISNCVADYSVLYNSASFSTFKCYGVSPTKLNDLCFTNVYADSFVIRGDEVRQIAPGQTGKIADYNYKLPDDFTGCVIAWNSNNLDSKVGGNYNYLYRLFRKSNLKPFERDISTEIYQAGSTPCNGVEGFNCYFPLQSYGFQPTNGVGYQPYRVVVLSFELLHAPATVCGPKKSTNLVKNKCVNFNFNGLTGTGVLTESNKKFLPFQQFGRDGSGGGGSGGGGSNITNLCPFGEVFNATRFASVYAWNRKRISNCVADYSVLYNSASFSTFKCYGVSPTKLNDLCFTNVYADSFVIRGDEVRQIAPGQTGKIADYNYKLPDDFTGCVIAWNSNNLDSKVGGNYNYLYRLFRKSNLKPFERDISTEIYQAGSTPCNGVEGFNCYFPLQSYGFQPTNGVGYQPYRVVVLSFELLHAPATVCGPKKSTNLVKNKCVNFNFNGLTGTGVLTESNKKFLPFQQFGRDGSGGGGDGGGGSGDKTHTCPPCPAPELLGGPSVFLFPPKPKDTLMISRTPEVTCVVVDVSHEDPEVKFNWYVDGVEVHNAKTKPREEQYNSTYRVVSVLTVLHQDWLNGKEYKCKVSNKALPAPIEKTISKAKGQPREPQVYTLPPSREELTKNQVSLTCLVKGFYPSDIAVEWESNGQPENNYKTTPPVLDSDGSFFLYSKLTVDKSRWQQGNVFSCSVMHEALHNHYTQKSLSLSPGS

SEQ ID NO: 162 - DNA, 2205 bp, synthetic construct
  misc_feature 1..2205: note = LS2397-2400 [(CTD_short_d)2-Fc]
  source 1..2205: mol_type = other DNA
ggcgatgagatgggtaccaatataaccaacttgtgcccatttggagaagtatttaatgccacaaggttcgcttccgtttatgcatggaaccgcaagcgaatttccaattgcgtggccgattactccgtactgtacaattccgctagcttctctactttcaaatgctatggcgtgtcacctactaagctcaatgatctgtgcttcacaaatgtttatgcagattcattcgttatcaggggggacgaggtgagacagatagctcccgggcaaacaggcaagattgccgactacaattataagctgccagatgattttaccggttgcgttatagcatggaattccaacaacctggacagcaaagtaggaggtaattacaattatctctatcgtctgtttaggaagagcaacctcaagcctttcgaacgggacatatcaacagagatatatcaagcaggttccactccctgtaacggcgttgagggatttaattgttatttcccactccaaagctatggttttcagccaactaacggcgtaggttaccaaccataccgtgtcgtcgttctgagtttcgagcttctccatgcccctgctaccgtatgtggtcccaaaaaatctaccaatctggttaaaaacaagtgtgtaaactttaactttaacgggctgaccggtactggggtactgactgagtctaataagaagttcctcccatttcagcaattcgggcgcgatggctccggtggcgggggaagcggcgggggtggcagtaatatcactaatctgtgcccctttggagaagtgttcaacgctacacggtttgcctccgtgtatgcatggaaccgaaaacgcatttctaattgcgtcgccgattatagtgtgttgtataatagcgcatccttctccacttttaaatgttacggagttagcccaaccaaactcaatgacctctgctttacaaacgtatatgccgatagttttgtaattaggggagatgaagtcagacaaatcgccccagggcaaactggaaaaatcgctgattacaactacaagctccctgacgattttacagggtgtgtgatagcttggaactctaacaacctcgacagtaaggtcggtggaaattataactatctgtaccgattgtttcgtaagtcaaacctgaaaccattcgaacgggatatttccactgagatttatcaggctggcagtacaccttgtaacggggtagagggattcaattgctactttccacttcagtcttacgggttccagcctacaaacggtgttggttaccagccctacagagttgtagttttgtcctttgaattgctccatgcccctgccaccgtctgtggacccaaaaaatcaactaaccttgtcaagaataagtgcgtgaacttcaacttcaatggtctcaccggcaccggggtacttacagagagtaacaaaaagttccttcccttccagcagtttgggcgagacggatccggcggcggcggtgacggtggtggcggctccggagacaagacccacacctgccccccttgtcctgcccctgagctgctgggcggaccctccgtgtttctgttcccccccaagcccaaggacaccctgatgatcagccggacccccgaggtcacctgcgtggtggtggacgtcagccacgaggacccagaggtcaagttcaattggtatgtggacggcgtggaggtgcacaacgccaagaccaagccccgggaggaacagtacaacagcacctaccgggtggtgtccgtgctgaccgtgctgcaccaggactggctgaacggcaaagaatacaagtgcaaggtgtccaacaaggccctgcctgcccccatcgagaaaaccatcagcaaggccaagggccagcccagagaaccccaggtgtacaccctgccccctagcagggaagagctgaccaagaaccaggtgtccctgacctgtctggtcaagggcttctaccccagcgatatcgccgtggagtgggagagcaacggccagcctgagaacaactacaagaccaccccccctgtgctggacagcgacggcagcttcttcctgtacagcaagctgaccgtggacaagagccggtggcagcagggcaacgtgtttagctgcagcgtgatgcacgaggccctgcacaaccactacacccagaagagcttaagcctgtcccctggcagttga

SEQ ID NO: 163 - protein, 672 aa, synthetic construct
  REGION 1..672: note = LS2401-2404 [(CTD_short_i)2-Fc]
GDEMGTNITNLCPFGEVFNATRFASVYAWNRKRISNCVADYSVLYNSASFSTFKCYGVSPTKLNDLCFTNVYADSFVIRGDEVRQIAPGQTGKIADYNYKLPDDFTGCVIAWNSNNLDSKVGGNYNYLYRLFRKSNLKPFERDISTEIYQAGSTPCNGVEGFNCYFPLQSYGFQPTNGVGYQPYRVVVLSFELLHAPATVCGPKKSTNLVKNKGSGGGGSGGGGSNITNLCPFGEVFNATRFASVYAWNRKRISNCVADYSVLYNSASFSTFKCYGVSPTKLNDLCFTNVYADSFVIRGDEVRQIAPGQTGKIADYNYKLPDDFTGCVIAWNSNNLDSKVGGNYNYLYRLFRKSNLKPFERDISTEIYQAGSTPCNGVEGFNCYFPLQSYGFQPTNGVGYQPYRVVVLSFELLHAPATVCGPKKSTNLVKNKGSGGGGDGGGGSGDKTHTCPPCPAPELLGGPSVFLFPPKPKDTLMISRTPEVTCVVVDVSHEDPEVKFNWYVDGVEVHNAKTKPREEQYNSTYRVVSVLTVLHQDWLNGKEYKCKVSNKALPAPIEKTISKAKGQPREPQVYTLPPSREELTKNQVSLTCLVKGFYPSDIAVEWESNGQPENNYKTTPPVLDSDGSFFLYSKLTVDKSRWQQGNVFSCSVMHEALHNHYTQKSLSLSPGS

SEQ ID NO: 164 - DNA, 2019 bp, synthetic construct
  misc_feature 1..2019: note = LS2401-2404 [(CTD_short_i)2-Fc]
  source 1..2019: mol_type = other DNA
ggcgatgagatgggtaccaatatcacaaacttgtgcccatttggggaggtcttcaatgccactcggtttgcatcagtatatgcatggaatcgtaaacggatatcaaattgcgttgctgactattcagtcctctataatagtgctagtttcagtacatttaaatgctacggagtatctcctactaagttgaatgacctttgcttcacaaatgtctatgctgacagttttgttattaggggtgacgaggtgcggcagattgcacccgggcaaacaggaaagatcgctgactacaattacaaacttcctgatgacttcactggttgtgtgattgcttggaattccaacaatctggattccaaagtgggtgggaattacaattacttgtatagattgtttagaaaatctaacctcaagccattcgaacgggatataagcacagaaatctatcaggctgggagcacaccttgtaacggcgtagaggggttcaattgctattttccacttcagtcatacggctttcaacccaccaatggggtgggataccagccatatcgagtggtcgtactctctttcgagctgcttcatgcccccgcaaccgtgtgtggtcccaaaaaaagcaccaatctcgtcaagaataagggatcaggggggggcggatcaggcggtggaggcagcaacataactaatctttgtccattcggtgaagtctttaatgcaacccgttttgcttctgtgtatgcatggaacaggaaaagaatatccaattgcgttgccgactatagcgtcctttacaattctgcctcctttagcacatttaagtgttatggggtctcccccactaagctgaatgatctgtgtttcaccaacgtttatgcagactcctttgttatacggggggatgaagttcgacaaatagcacccgggcagacagggaagatcgctgactacaattacaagcttccagatgacttcactgggtgcgtaatcgcctggaacagtaacaacttggactctaaagtcggagggaattataattacctttatcgtctcttccgcaaaagtaacttgaagccttttgagagggacatttccacagagatatatcaagcaggttccacaccatgcaacggcgtcgagggatttaattgttatttccccctccaatcatacggctttcagccaactaacggcgttggctaccaaccatacagagtcgtagtgctttcctttgaactgctgcacgcccctgccactgtgtgtggcccaaaaaagagcaccaatttggtaaagaacaagggatccggcggcggcggtgacggtggtggcggctccggagacaagacccacacctgccccccttgtcctgcccctgagctgctgggcggaccctccgtgtttctgttcccccccaagcccaaggacaccctgatgatcagccggacccccgaggtcacctgcgtggtggtggacgtcagccacgaggacccagaggtcaagttcaattggtatgtggacggcgtggaggtgcacaacgccaagaccaagccccgggaggaacagtacaacagcacctaccgggtggtgtccgtgctgaccgtgctgcaccaggactggctgaacggcaaagaatacaagtgcaaggtgtccaacaaggccctgcctgcccccatcgagaaaaccatcagcaaggccaagggccagcccagagaaccccaggtgtacaccctgccccctagcagggaagagctgaccaagaaccaggtgtccctgacctgtctggtcaagggcttctaccccagcgatatcgccgtggagtgggagagcaacggccagcctgagaacaactacaagaccaccccccctgtgctggacagcgacggcagcttcttcctgtacagcaagctgaccgtggacaagagccggtggcagcagggcaacgtgtttagctgcagcgtgatgcacgaggccctgcacaaccactacacccagaagagcttaagcctgtcccctggcagttga

SEQ ID NO: 165 - protein, 672 aa, synthetic construct
  REGION 1..672: note = LS2421 and LS2422 [(CTD_short_i)2-Fc; D2 mutations for 501.V2 variant, K417N, E484K, N501Y]
GDEMGTNITNLCPFGEVFNATRFASVYAWNRKRISNCVADYSVLYNSASFSTFKCYGVSPTKLNDLCFTNVYADSFVIRGDEVRQIAPGQTGKIADYNYKLPDDFTGCVIAWNSNNLDSKVGGNYNYLYRLFRKSNLKPFERDISTEIYQAGSTPCNGVEGFNCYFPLQSYGFQPTNGVGYQPYRVVVLSFELLHAPATVCGPKKSTNLVKNKGSGGGGSGGGGSNITNLCPFGEVFNATRFASVYAWNRKRISNCVADYSVLYNSASFSTFKCYGVSPTKLNDLCFTNVYADSFVIRGDEVRQIAPGQTGNIADYNYKLPDDFTGCVIAWNSNNLDSKVGGNYNYLYRLFRKSNLKPFERDISTEIYQAGSTPCNGVKGFNCYFPLQSYGFQPTYGVGYQPYRVVVLSFELLHAPATVCGPKKSTNLVKNKGSGGGGDGGGGSGDKTHTCPPCPAPELLGGPSVFLFPPKPKDTLMISRTPEVTCVVVDVSHEDPEVKFNWYVDGVEVHNAKTKPREEQYNSTYRVVSVLTVLHQDWLNGKEYKCKVSNKALPAPIEKTISKAKGQPREPQVYTLPPSREELTKNQVSLTCLVKGFYPSDIAVEWESNGQPENNYKTTPPVLDSDGSFFLYSKLTVDKSRWQQGNVFSCSVMHEALHNHYTQKSLSLSPGS

SEQ ID NO: 166 - DNA, 2019 bp, synthetic construct
  misc_feature 1..2019: note = LS2421 and LS2422 [(CTD_short_i)2-Fc; D2 mutations for 501.V2 variant, K417N, E484K, N501Y]
  source 1..2019: mol_type = other DNA
ggcgatgagatgggtaccaatatcacaaacttgtgcccatttggggaggtcttcaatgccactcggtttgcatcagtatatgcatggaatcgtaaacggatatcaaattgcgttgctgactattcagtcctctataatagtgctagtttcagtacatttaaatgctacggagtatctcctactaagttgaatgacctttgcttcacaaatgtctatgctgacagttttgttattaggggtgacgaggtgcggcagattgcacccgggcaaacaggaaagatcgctgactacaattacaaacttcctgatgacttcactggttgtgtgattgcttggaattccaacaatctggattccaaagtgggtgggaattacaattacttgtatagattgtttagaaaatctaacctcaagccattcgaacgggatataagcacagaaatctatcaggctgggagcacaccttgtaacggcgtagaggggttcaattgctattttccacttcagtcatacggctttcaacccaccaatggggtgggataccagccatatcgagtggtcgtactctctttcgagctgcttcatgcccccgcaaccgtgtgtggtcccaaaaaaagcaccaatctcgtcaagaataagggatcaggggggggcggatcaggcggtggaggcagcaacataactaatctttgtccattcggtgaagtctttaatgcaacccgttttgcttctgtgtatgcatggaacaggaaaagaatatccaattgcgttgccgactatagcgtcctttacaattctgcctcctttagcacatttaagtgttatggggtctcccccactaagctgaatgatctgtgtttcaccaacgtttatgcagactcctttgttatacggggggatgaagttcgacaaatagcacccgggcagacagggaacatcgctgactacaattacaagcttccagatgacttcactgggtgcgtaatcgcctggaacagtaacaacttggactctaaagtcggagggaattataattacctttatcgtctcttccgcaaaagtaacttgaagccttttgagagggacatttccacagagatatatcaagcaggttccacaccatgcaacggcgtcaagggatttaattgttatttccccctccaatcatacggctttcagccaacttacggcgttggctaccaaccatacagagtcgtagtgctttcctttgaactgctgcacgcccctgccactgtgtgtggcccaaaaaagagcaccaatttggtaaagaacaagggatccggcggcggcggtgacggtggtggcggctccggagacaagacccacacctgccccccttgtcctgcccctgagctgctgggcggaccctccgtgtttctgttcccccccaagcccaaggacaccctgatgatcagccggacccccgaggtcacctgcgtggtggtggacgtcagccacgaggacccagaggtcaagttcaattggtatgtggacggcgtggaggtgcacaacgccaagaccaagccccgggaggaacagtacaacagcacctaccgggtggtgtccgtgctgaccgtgctgcaccaggactggctgaacggcaaagaatacaagtgcaaggtgtccaacaaggccctgcctgcccccatcgagaaaaccatcagcaaggccaagggccagcccagagaaccccaggtgtacaccctgccccctagcagggaagagctgaccaagaaccaggtgtccctgacctgtctggtcaagggcttctaccccagcgatatcgccgtggagtgggagagcaacggccagcctgagaacaactacaagaccaccccccctgtgctggacagcgacggcagcttcttcctgtacagcaagctgaccgtggacaagagccggtggcagcagggcaacgtgtttagctgcagcgtgatgcacgaggccctgcacaaccactacacccagaagagcttaagcctgtcccctggcagttga

SEQ ID NO: 167 - protein, 672 aa, synthetic construct
  REGION 1..672: note = LS2423 [(CTD_short_i)2-Fc; D2 mutations for hybrid P.1 and CAL.20C variants; K417T, L452R, E484K, N501Y]
GDEMGTNITNLCPFGEVFNATRFASVYAWNRKRISNCVADYSVLYNSASFSTFKCYGVSPTKLNDLCFTNVYADSFVIRGDEVRQIAPGQTGKIADYNYKLPDDFTGCVIAWNSNNLDSKVGGNYNYLYRLFRKSNLKPFERDISTEIYQAGSTPCNGVEGFNCYFPLQSYGFQPTNGVGYQPYRVVVLSFELLHAPATVCGPKKSTNLVKNKGSGGGGSGGGGSNITNLCPFGEVFNATRFASVYAWNRKRISNCVADYSVLYNSASFSTFKCYGVSPTKLNDLCFTNVYADSFVIRGDEVRQIAPGQTGTIADYNYKLPDDFTGCVIAWNSNNLDSKVGGNYNYRYRLFRKSNLKPFERDISTEIYQAGSTPCNGVKGFNCYFPLQSYGFQPTYGVGYQPYRVVVLSFELLHAPATVCGPKKSTNLVKNKGSGGGGDGGGGSGDKTHTCPPCPAPELLGGPSVFLFPPKPKDTLMISRTPEVTCVVVDVSHEDPEVKFNWYVDGVEVHNAKTKPREEQYNSTYRVVSVLTVLHQDWLNGKEYKCKVSNKALPAPIEKTISKAKGQPREPQVYTLPPSREELTKNQVSLTCLVKGFYPSDIAVEWESNGQPENNYKTTPPVLDSDGSFFLYSKLTVDKSRWQQGNVFSCSVMHEALHNHYTQKSLSLSPGS

SEQ ID NO: 168 - DNA, 2019 bp, synthetic construct
  misc_feature 1..2019: note = LS2423 [(CTD_short_i)2-Fc; D2 mutations for hybrid P.1 and CAL.20C variants; K417T, L452R, E484K, N501Y]
  source 1..2019: mol_type = other DNA
ggcgatgagatgggtaccaatatcacaaacttgtgcccatttggggaggtcttcaatgccactcggtttgcatcagtatatgcatggaatcgtaaacggatatcaaattgcgttgctgactattcagtcctctataatagtgctagtttcagtacatttaaatgctacggagtatctcctactaagttgaatgacctttgcttcacaaatgtctatgctgacagttttgttattaggggtgacgaggtgcggcagattgcacccgggcaaacaggaaagatcgctgactacaattacaaacttcctgatgacttcactggttgtgtgattgcttggaattccaacaatctggattccaaagtgggtgggaattacaattacttgtatagattgtttagaaaatctaacctcaagccattcgaacgggatataagcacagaaatctatcaggctgggagcacaccttgtaacggcgtagaggggttcaattgctattttccacttcagtcatacggctttcaacccaccaatggggtgggataccagccatatcgagtggtcgtactctctttcgagctgcttcatgcccccgcaaccgtgtgtggtcccaaaaaaagcaccaatctcgtcaagaataagggatcaggggggggcggatcaggcggtggaggcagcaacataactaatctttgtccattcggtgaagtctttaatgcaacccgttttgcttctgtgtatgcatggaacaggaaaagaatatccaattgcgttgccgactatagcgtcctttacaattctgcctcctttagcacatttaagtgttatggggtctcccccactaagctgaatgatctgtgtttcaccaacgtttatgcagactcctttgttatacggggggatgaagttcgacaaatagcacccgggcagacagggaccatcgctgactacaattacaagcttccagatgacttcactgggtgcgtaatcgcctggaacagtaacaacttggactctaaagtcggagggaattataattaccggtatcgtctcttccgcaaaagtaacttgaagccttttgagagggacatttccacagagatatatcaagcaggttccacaccatgcaacggcgtcaagggatttaattgttatttccccctccaatcatacggctttcagccaacttacggcgttggctaccaaccatacagagtcgtagtgctttcctttgaactgctgcacgcccctgccactgtgtgtggcccaaaaaagagcaccaatttggtaaagaacaagggatccggcggcggcggtgacggtggtggcggctccggagacaagacccacacctgccccccttgtcctgcccctgagctgctgggcggaccctccgtgtttctgttcccccccaagcccaaggacaccctgatgatcagccggacccccgaggtcacctgcgtggtggtggacgtcagccacgaggacccagaggtcaagttcaattggtatgtggacggcgtggaggtgcacaacgccaagaccaagccccgggaggaacagtacaacagcacctaccgggtggtgtccgtgctgaccgtgctgcaccaggactggctgaacggcaaagaatacaagtgcaaggtgtccaacaaggccctgcctgcccccatcgagaaaaccatcagcaaggccaagggccagcccagagaaccccaggtgtacaccctgccccctagcagggaagagctgaccaagaaccaggtgtccctgacctgtctggtcaagggcttctaccccagcgatatcgccgtggagtgggagagcaacggccagcctgagaacaactacaagaccaccccccctgtgctggacagcgacggcagcttcttcctgtacagcaagctgaccgtggacaagagccggtggcagcagggcaacgtgtttagctgcagcgtgatgcacgaggccctgcacaaccactacacccagaagagcttaagcctgtcccctggcagttga

SEQ ID NO: 169 - protein, 672 aa, synthetic construct
  REGION 1..672: note = LS2435 [(CTD_short_i)2-Fc; D1 and D2 mutations for hybrid P.1 and CAL.20C variants; K417T, L452R, E484K, N501Y]
GDEMGTNITNLCPFGEVFNATRFASVYAWNRKRISNCVADYSVLYNSASFSTFKCYGVSPTKLNDLCFTNVYADSFVIRGDEVRQIAPGQTGTIADYNYKLPDDFTGCVIAWNSNNLDSKVGGNYNYRYRLFRKSNLKPFERDISTEIYQAGSTPCNGVKGFNCYFPLQSYGFQPTYGVGYQPYRVVVLSFELLHAPATVCGPKKSTNLVKNKGSGGGGSGGGGSNITNLCPFGEVFNATRFASVYAWNRKRISNCVADYSVLYNSASFSTFKCYGVSPTKLNDLCFTNVYADSFVIRGDEVRQIAPGQTGTIADYNYKLPDDFTGCVIAWNSNNLDSKVGGNYNYRYRLFRKSNLKPFERDISTEIYQAGSTPCNGVKGFNCYFPLQSYGFQPTYGVGYQPYRVVVLSFELLHAPATVCGPKKSTNLVKNKGSGGGGDGGGGSGDKTHTCPPCPAPELLGGPSVFLFPPKPKDTLMISRTPEVTCVVVDVSHEDPEVKFNWYVDGVEVHNAKTKPREEQYNSTYRVVSVLTVLHQDWLNGKEYKCKVSNKALPAPIEKTISKAKGQPREPQVYTLPPSREELTKNQVSLTCLVKGFYPSDIAVEWESNGQPENNYKTTPPVLDSDGSFFLYSKLTVDKSRWQQGNVFSCSVMHEALHNHYTQKSLSLSPGS

SEQ ID NO: 170 - DNA, 2019 bp, synthetic construct
  misc_feature 1..2019: note = LS2435 [(CTD_short_i)2-Fc; D1 and D2 mutations for hybrid P.1 and CAL.20C variants; K417T, L452R, E484K, N501Y]
  source 1..2019: mol_type = other DNA
ggcgatgagatgggtaccaatatcacaaacttgtgcccatttggggaggtcttcaatgccactcggtttgcatcagtatatgcatggaatcgtaaacggatatcaaattgcgttgctgactattcagtcctctataatagtgctagtttcagtacatttaaatgctacggagtatctcctactaagttgaatgacctttgcttcacaaatgtctatgctgacagttttgttattaggggtgacgaggtgcggcagattgcacccgggcaaacaggaaccatcgctgactacaattacaaacttcctgatgacttcactggttgtgtgattgcttggaattccaacaatctggattccaaagtgggtgggaattacaattacagatatagattgtttagaaaatctaacctcaagccattcgaacgggatataagcacagaaatctatcaggctgggagcacaccttgtaacggcgtaaaggggttcaattgctattttccacttcagtcatacggctttcaacccacctatggggtgggataccagccatatcgagtggtcgtactctctttcgagctgcttcatgcccccgcaaccgtgtgtggtcccaaaaaaagcaccaatctcgtcaagaataagggatcaggggggggcggatcaggcggtggaggcagcaacataactaatctttgtccattcggtgaagtctttaatgcaacccgttttgcttctgtgtatgcatggaacaggaaaagaatatccaattgcgttgccgactatagcgtcctttacaattctgcctcctttagcacatttaagtgttatggggtctcccccactaagctgaatgatctgtgtttcaccaacgtttatgcagactcctttgttatacggggggatgaagttcgacaaatagcacccgggcagacagggaccatcgctgactacaattacaagcttccagatgacttcactgggtgcgtaatcgcctggaacagtaacaacttggactctaaagtcggagggaattataattaccggtatcgtctcttccgcaaaagtaacttgaagccttttgagagggacatttccacagagatatatcaagcaggttccacaccatgcaacggcgtcaagggatttaattgttatttccccctccaatcatacggctttcagccaacttacggcgttggctaccaaccatacagagtcgtagtgctttcctttgaactgctgcacgcccctgccactgtgtgtggcccaaaaaagagcaccaatttggtaaagaacaagggatccggcggcggcggtgacggtggtggcggctccggagacaagacccacacctgccccccttgtcctgcccctgagctgctgggcggaccctccgtgtttctgttcccccccaagcccaaggacaccctgatgatcagccggacccccgaggtcacctgcgtggtggtggacgtcagccacgaggacccagaggtcaagttcaattggtatgtggacggcgtggaggtgcacaacgccaagaccaagccccgggaggaacagtacaacagcacctaccgggtggtgtccgtgctgaccgtgctgcaccaggactggctgaacggcaaagaatacaagtgcaaggtgtccaacaaggccctgcctgcccccatcgagaaaaccatcagcaaggccaagggccagcccagagaaccccaggtgtacaccctgccccctagcagggaagagctgaccaagaaccaggtgtccctgacctgtctggtcaagggcttctaccccagcgatatcgccgtggagtgggagagcaacggccagcctgagaacaactacaagaccaccccccctgtgctggacagcgacggcagcttcttcctgtacagcaagctgaccgtggacaagagccggtggcagcagggcaacgtgtttagctgcagcgtgatgcacgaggccctgcacaaccactacacccagaagagcttaagcctgtcccctggcagttga

SEQ ID NO: 171 - protein, 76 aa, synthetic construct; identical to SEQ ID NO: 59
  REGION 1..76: note = RBD-tight

SEQ ID NO: 172 - DNA, 228 bp, synthetic construct
  misc_feature 1..228: note = RBD-tight
  source 1..228: mol_type = other DNA
atcgcatggaacagcaacaacctggatagcaaagtgggcggcaactataattacctgtatcgactcttcagaaagagtaatctgaagcctttcgaaagggatatcagtactgaaatatatcaggctggcagtactccttgcaatggagtagagggctttaactgttatttcccacttcagtcatacggttttcagcccaccaacggagtcggctatcagccttacaga

SEQ ID NO: 173 - protein, 158 aa, synthetic construct
  REGION 1..158: note = (RBD-tight)2
IAWNSNNLDSKVGGNYNYLYRLFRKSNLKPFERDISTEIYQAGSTPCNGVEGFNCYFPLQSYGFQPTNGVGYQPYRSGGGGSIAWNSNNLDSKVGGNYNYLYRLFRKSNLKPFERDISTEIYQAGSTPCNGVEGFNCYFPLQSYGFQPTNGVGYQPYR

SEQ ID NO: 174 - DNA, 474 bp, synthetic construct
  misc_feature 1..474: note = (RBD-tight)2
  source 1..474: mol_type = other DNA
atcgcatggaacagcaacaacctggatagcaaagtgggcggcaactataattacctgtatcgactcttcagaaagagtaatctgaagcctttcgaaagggatatcagtactgaaatatatcaggctggcagtactccttgcaatggagtagagggctttaactgttatttcccacttcagtcatacggttttcagcccaccaacggagtcggctatcagccttacagatcagggggcggaggaagtatcgcatggaactccaataatctcgacagcaaagtcggaggcaattacaattatctgtataggctcttcagaaaaagtaacctcaagccgttcgaacgggatatcagcactgagatataccaagccgggagtacaccctgtaacggagtcgagggctttaactgttacttccctctacagtcctatggctttcagcccaccaatggcgttgggtatcagccttataga

SEQ ID NO: 175 - protein, 90 aa, synthetic construct
  REGION 1..90: note = RBD-extended
IAWNSNNLDSKVGGNYNYLYRLFRKSNLKPFERDISTEIYQAGSTPCNGVEGFNCYFPLQSYGFQPTNGVGYQPYRVVVLSFELLHAPAT

SEQ ID NO: 176 - DNA, 270 bp, synthetic construct
  misc_feature 1..270: note = RBD-extended
  source 1..270: mol_type = other DNA
attgcatggaattcaaacaacctggattccaaggtcggtggtaattacaactatctatacagactgttccgaaagagcaacttgaaaccctttgaacgtgatatctccacagaaatttatcaggccggttccaccccttgcaacggcgttgagggttttaactgctattttccgctgcagagctacggttttcagccaactaatggagttggatatcaaccttaccgggtggttgtgctatccttcgaattgctccatgctcctgctacc

SEQ ID NO: 177 - protein, 184 aa, synthetic construct
  REGION 1..184: note = (RBD-extended)2
IAWNSNNLDSKVGGNYNYLYRLFRKSNLKPFERDISTEIYQAGSTPCNGVEGFNCYFPLQSYGFQPTNGVGYQPYRVVVLSFELLHAPATGGGSIAWNSNNLDSKVGGNYNYLYRLFRKSNLKPFERDISTEIYQAGSTPCNGVEGFNCYFPLQSYGFQPTNGVGYQPYRVVVLSFELLHAPAT

SEQ ID NO: 178 - DNA, 552 bp, synthetic construct
  misc_feature 1..552: note = (RBD-extended)2
  source 1..552: mol_type = other DNA
attgcatggaattcaaacaacctggattccaaggtcggtggtaattacaactatctatacagactgttccgaaagagcaacttgaaaccctttgaacgtgatatctccacagaaatttatcaggccggttccaccccttgcaacggcgttgagggttttaactgctattttccgctgcagagctacggttttcagccaactaatggagttggatatcaaccttaccgggtggttgtgctatccttcgaattgctccatgctcctgctaccggtggcggcagcatcgcatggaacagcaataatttggatagtaaagtgggcgggaattataactacctgtaccggctgttcagaaagagcaatctgaaaccttttgagcgggacatttccactgagatctaccaggccggcagcaccccctgtaacggagtcgaaggattcaattgttacttcccacttcaaagctatggattccaacctacaaatggggtcggctatcaaccatatcgcgttgtggtcttgtcctttgagcttttgcatgcccctgccact

SEQ ID NO: 179 - protein, 77 aa, synthetic construct
  REGION 1..77: note = RBD
IAWNSNNLDSKVGGNYNYLYRLFRKSNLKPFERDISTEIYQAGSTPCNGVEGFNCYFPLQSYGFQPTNGVGYQPYRS

SEQ ID NO: 180 - DNA, 231 bp, synthetic construct
  misc_feature 1..231: note = RBD
  source 1..231: mol_type = other DNA
atcgcttggaactccaacaatctggactccaaagtgggcggaaattacaattatctgtatcgcctcttccgtaagtctaacctcaagccttttgagagagacatctccactgagatatatcaggccggatcaactccctgtaacggtgtagaagggttcaattgctatttcccactgcagagttacggttttcagcccactaatggcgttggataccaaccctacaggtca

SEQ ID NO: 181 - protein, 158 aa, synthetic construct; identical to SEQ ID NO: 173
  REGION 1..158: note = (RBD)2

SEQ ID NO: 182 - DNA, 474 bp, synthetic construct
  misc_feature 1..474: note = (RBD)2
  source 1..474: mol_type = other DNA
atcgcttggaactccaacaatctggactccaaagtgggcggaaattacaattatctgtatcgcctcttccgtaagtctaacctcaagccttttgagagagacatctccactgagatatatcaggccggatcaactccctgtaacggtgtagaagggttcaattgctatttcccactgcagagttacggttttcagcccactaatggcgttggataccaaccctacaggtcaggaggcgggggatctattgcctggaactcaaataatctcgattctaaggttggcggtaactataattatctctatcggctgttccgcaaatccaaccttaaaccctttgagcgtgatataagtactgagatttaccaagcagggagcaccccctgcaatggcgtggaagggttcaactgctacttccccctccaaagctatggatttcagccaactaacggcgttggttaccagccctataga

SEQ ID NO: 183 - protein, 488 aa, synthetic construct
  REGION 1..488: note = (CTD_short_d)2
NITNLCPFGEVFNATRFASVYAWNRKRISNCVADYSVLYNSASFSTFKCYGVSPTKLNDLCFTNVYADSFVIRGDEVRQIAPGQTGKIADYNYKLPDDFTGCVIAWNSNNLDSKVGGNYNYLYRLFRKSNLKPFERDISTEIYQAGSTPCNGVEGFNCYFPLQSYGFQPTNGVGYQPYRVVVLSFELLHAPATVCGPKKSTNLVKNKCVNFNFNGLTGTGVLTESNKKFLPFQQFGRDGSGGGGSGGGGSNITNLCPFGEVFNATRFASVYAWNRKRISNCVADYSVLYNSASFSTFKCYGVSPTKLNDLCFTNVYADSFVIRGDEVRQIAPGQTGKIADYNYKLPDDFTGCVIAWNSNNLDSKVGGNYNYLYRLFRKSNLKPFERDISTEIYQAGSTPCNGVEGFNCYFPLQSYGFQPTNGVGYQPYRVVVLSFELLHAPATVCGPKKSTNLVKNKCVNFNFNGLTGTGVLTESNKKFLPFQQFGRD

SEQ ID NO: 184 - DNA, 1464 bp, synthetic construct
  misc_feature 1..1464: note = (CTD_short_d)2
  source 1..1464: mol_type = other DNA
aatataaccaacttgtgcccatttggagaagtatttaatgccacaaggttcgcttccgtttatgcatggaaccgcaagcgaatttccaattgcgtggccgattactccgtactgtacaattccgctagcttctctactttcaaatgctatggcgtgtcacctactaagctcaatgatctgtgcttcacaaatgtttatgcagattcattcgttatcaggggggacgaggtgagacagatagctcccgggcaaacaggcaagattgccgactacaattataagctgccagatgattttaccggttgcgttatagcatggaattccaacaacctggacagcaaagtaggaggtaattacaattatctctatcgtctgtttaggaagagcaacctcaagcctttcgaacgggacatatcaacagagatatatcaagcaggttccactccctgtaacggcgttgagggatttaattgttatttcccactccaaagctatggttttcagccaactaacggcgtaggttaccaaccataccgtgtcgtcgttctgagtttcgagcttctccatgcccctgctaccgtatgtggtcccaaaaaatctaccaatctggttaaaaacaagtgtgtaaactttaactttaacgggctgaccggtactggggtactgactgagtctaataagaagttcctcccatttcagcaattcgggcgcgatggctccggtggcgggggaagcggcgggggtggcagtaatatcactaatctgtgcccctttggagaagtgttcaacgctacacggtttgcctccgtgtatgcatggaaccgaaaacgcatttctaattgcgtcgccgattatagtgtgttgtataatagcgcatccttctccacttttaaatgttacggagttagcccaaccaaactcaatgacctctgctttacaaacgtatatgccgatagttttgtaattaggggagatgaagtcagacaaatcgccccagggcaaactggaaaaatcgctgattacaactacaagctccctgacgattttacagggtgtgtgatagcttggaactctaacaacctcgacagtaaggtcggtggaaattataactatctgtaccgattgtttcgtaagtcaaacctgaaaccattcgaacgggatatttccactgagatttatcaggctggcagtacaccttgtaacggggtagagggattcaattgctactttccacttcagtcttacgggttccagcctacaaacggtgttggttaccagccctacagagttgtagttttgtcctttgaattgctccatgcccctgccaccgtctgtggacccaaaaaatcaactaaccttgtcaagaataagtgcgtgaacttcaacttcaatggtctcaccggcaccggggtacttacagagagtaacaaaaagttccttcccttccagcagtttgggcgagac

SEQ ID NO: 185 - protein, 426 aa, synthetic construct
  REGION 1..426: note = (CTD_short_i)2
NITNLCPFGEVFNATRFASVYAWNRKRISNCVADYSVLYNSASFSTFKCYGVSPTKLNDLCFTNVYADSFVIRGDEVRQIAPGQTGKIADYNYKLPDDFTGCVIAWNSNNLDSKVGGNYNYLYRLFRKSNLKPFERDISTEIYQAGSTPCNGVEGFNCYFPLQSYGFQPTNGVGYQPYRVVVLSFELLHAPATVCGPKKSTNLVKNKGSGGGGSGGGGSNITNLCPFGEVFNATRFASVYAWNRKRISNCVADYSVLYNSASFSTFKCYGVSPTKLNDLCFTNVYADSFVIRGDEVRQIAPGQTGKIADYNYKLPDDFTGCVIAWNSNNLDSKVGGNYNYLYRLFRKSNLKPFERDISTEIYQAGSTPCNGVEGFNCYFPLQSYGFQPTNGVGYQPYRVVVLSFELLHAPATVCGPKKSTNLVKNK

SEQ ID NO: 186 - DNA, 1278 bp, synthetic construct
  misc_feature 1..1278: note = (CTD_short_i)2
  source 1..1278: mol_type = other DNA
aatatcacaaacttgtgcccatttggggaggtcttcaatgccactcggtttgcatcagtatatgcatggaatcgtaaacggatatcaaattgcgttgctgactattcagtcctctataatagtgctagtttcagtacatttaaatgctacggagtatctcctactaagttgaatgacctttgcttcacaaatgtctatgctgacagttttgttattaggggtgacgaggtgcggcagattgcacccgggcaaacaggaaagatcgctgactacaattacaaacttcctgatgacttcactggttgtgtgattgcttggaattccaacaatctggattccaaagtgggtgggaattacaattacttgtatagattgtttagaaaatctaacctcaagccattcgaacgggatataagcacagaaatctatcaggctgggagcacaccttgtaacggcgtagaggggttcaattgctattttccacttcagtcatacggctttcaacccaccaatggggtgggataccagccatatcgagtggtcgtactctctttcgagctgcttcatgcccccgcaaccgtgtgtggtcccaaaaaaagcaccaatctcgtcaagaataagggatcaggggggggcggatcaggcggtggaggcagcaacataactaatctttgtccattcggtgaagtctttaatgcaacccgttttgcttctgtgtatgcatggaacaggaaaagaatatccaattgcgttgccgactatagcgtcctttacaattctgcctcctttagcacatttaagtgttatggggtctcccccactaagctgaatgatctgtgtttcaccaacgtttatgcagactcctttgttatacggggggatgaagttcgacaaatagcacccgggcagacagggaagatcgctgactacaattacaagcttccagatgacttcactgggtgcgtaatcgcctggaacagtaacaacttggactctaaagtcggagggaattataattacctttatcgtctcttccgcaaaagtaacttgaagccttttgagagggacatttccacagagatatatcaagcaggttccacaccatgcaacggcgtcgagggatttaattgttatttccccctccaatcatacggctttcagccaactaacggcgttggctaccaaccatacagagtcgtagtgctttcctttgaactgctgcacgcccctgccactgtgtgtggcccaaaaaagagcaccaatttggtaaagaacaag

SEQ ID NO: 187 - protein, 427 aa, synthetic construct
  REGION 1..427: note = (CTD_short_i)2 [D2 mutations for 501.V2 variant, K417N, E484K, N501Y - mod. 1]
NITNLCPFGEVFNATRFASVYAWNRKRISNCVADYSVLYNSASFSTFKCYGVSPTKLNDLCFTNVYADSFVIRGDEVRQIAPGQTGKIADYNYKLPDDFTGCVIAWNSNNLDSKVGGNYNYLYRLFRKSNLKPFERDISTEIYQAGSTPCNGVEGFNCYFPLQSYGFQPTNGVGYQPYRVVVLSFELLHAPATVCGPKKSTNLVKNKGSGGGGSGGGGSNITNLCPFGEVFNATRFASVYAWNRKRISNCVADYSVLYNSASFSTFKCYGVSPTKLNDLCFTNVYADSFVIRGDEVRQIAPGQTGNNIADYNYKLPDDFTGCVIAWNSNNLDSKVGGNYNYLYRLFRKSNLKPFERDISTEIYQAGSTPCNGVKGFNCYFPLQSYGFQPTYGVGYQPYRVVVLSFELLHAPATVCGPKKSTNLVKNK

SEQ ID NO: 188 - DNA, 1278 bp, synthetic construct
  misc_feature 1..1278: note = (CTD_short_i)2 [D2 mutations for 501.V2 variant, K417N, E484K, N501Y - mod. 1]
  source 1..1278: mol_type = other DNA
aatatcacaaacttgtgcccatttggggaggtcttcaatgccactcggtttgcatcagtatatgcatggaatcgtaaacggatatcaaattgcgttgctgactattcagtcctctataatagtgctagtttcagtacatttaaatgctacggagtatctcctactaagttgaatgacctttgcttcacaaatgtctatgctgacagttttgttattaggggtgacgaggtgcggcagattgcacccgggcaaacaggaaagatcgctgactacaattacaaacttcctgatgacttcactggttgtgtgattgcttggaattccaacaatctggattccaaagtgggtgggaattacaattacttgtatagattgtttagaaaatctaacctcaagccattcgaacgggatataagcacagaaatctatcaggctgggagcacaccttgtaacggcgtagaggggttcaattgctattttccacttcagtcatacggctttcaacccaccaatggggtgggataccagccatatcgagtggtcgtactctctttcgagctgcttcatgcccccgcaaccgtgtgtggtcccaaaaaaagcaccaatctcgtcaagaataagggatcaggggggggcggatcaggcggtggaggcagcaacataactaatctttgtccattcggtgaagtctttaatgcaacccgttttgcttctgtgtatgcatggaacaggaaaagaatatccaattgcgttgccgactatagcgtcctttacaattctgcctcctttagcacatttaagtgttatggggtctcccccactaagctgaatgatctgtgtttcaccaacgtttatgcagactcctttgttatacggggggatgaagttcgacaaatagcacccgggcagacagggaacatcgctgactacaattacaagcttccagatgacttcactgggtgcgtaatcgcctggaacagtaacaacttggactctaaagtcggagggaattataattacctttatcgtctcttccgcaaaagtaacttgaagccttttgagagggacatttccacagagatatatcaagcaggttccacaccatgcaacggcgtcaagggatttaattgttatttccccctccaatcatacggctttcagccaacttacggcgttggctaccaaccatacagagtcgtagtgctttcctttgaactgctgcacgcccctgccactgtgtgtggcccaaaaaagagcaccaatttggtaaagaacaag

SEQ ID NO: 189 - protein, 426 aa, synthetic construct
  REGION 1..426: note = (CTD_short_i)2 [D2 mutations for hybrid P.1 and CAL.20C variants; K417T, L452R, E484K, N501Y - mod. 2]
NITNLCPFGEVFNATRFASVYAWNRKRISNCVADYSVLYNSASFSTFKCYGVSPTKLNDLCFTNVYADSFVIRGDEVRQIAPGQTGKIADYNYKLPDDFTGCVIAWNSNNLDSKVGGNYNYLYRLFRKSNLKPFERDISTEIYQAGSTPCNGVEGFNCYFPLQSYGFQPTNGVGYQPYRVVVLSFELLHAPATVCGPKKSTNLVKNKGSGGGGSGGGGSNITNLCPFGEVFNATRFASVYAWNRKRISNCVADYSVLYNSASFSTFKCYGVSPTKLNDLCFTNVYADSFVIRGDEVRQIAPGQTGTIADYNYKLPDDFTGCVIAWNSNNLDSKVGGNYNYRYRLFRKSNLKPFERDISTEIYQAGSTPCNGVKGFNCYFPLQSYGFQPTYGVGYQPYRVVVLSFELLHAPATVCGPKKSTNLVKNK

SEQ ID NO: 190 - DNA, 1278 bp, synthetic construct
  misc_feature 1..1278: note = (CTD_short_i)2 [D2 mutations for hybrid P.1 and CAL.20C variants; K417T, L452R, E484K, N501Y - mod. 2]
  source 1..1278: mol_type = other DNA
aatatcacaaacttgtgcccatttggggaggtcttcaatgccactcggtttgcatcagtatatgcatggaatcgtaaacggatatcaaattgcgttgctgactattcagtcctctataatagtgctagtttcagtacatttaaatgctacggagtatctcctactaagttgaatgacctttgcttcacaaatgtctatgctgacagttttgttattaggggtgacgaggtgcggcagattgcacccgggcaaacaggaaagatcgctgactacaattacaaacttcctgatgacttcactggttgtgtgattgcttggaattccaacaatctggattccaaagtgggtgggaattacaattacttgtatagattgtttagaaaatctaacctcaagccattcgaacgggatataagcacagaaatctatcaggctgggagcacaccttgtaacggcgtagaggggttcaattgctattttccacttcagtcatacggctttcaacccaccaatggggtgggataccagccatatcgagtggtcgtactctctttcgagctgcttcatgcccccgcaaccgtgtgtggtcccaaaaaaagcaccaatctcgtcaagaataagggatcaggggggggcggatcaggcggtggaggcagcaacataactaatctttgtccattcggtgaagtctttaatgcaacccgttttgcttctgtgtatgcatggaacaggaaaagaatatccaattgcgttgccgactatagcgtcctttacaattctgcctcctttagcacatttaagtgttatggggtctcccccactaagctgaatgatctgtgtttcaccaacgtttatgcagactcctttgttatacggggggatgaagttcgacaaatagcacccgggcagacagggaccatcgctgactacaattacaagcttccagatgacttcactgggtgcgtaatcgcctggaacagtaacaacttggactctaaagtcggagggaattataattaccggtatcgtctcttccgcaaaagtaacttgaagccttttgagagggacatttccacagagatatatcaagcaggttccacaccatgcaacggcgtcaagggatttaattgttatttccccctccaatcatacggctttcagccaacttacggcgttggctaccaaccatacagagtcgtagtgctttcctttgaactgctgcacgcccctgccactgtgtgtggcccaaaaaagagcaccaatttggtaaagaacaag

SEQ ID NO: 191 - protein, 426 aa, synthetic construct
  REGION 1..426: note = (CTD_short_i)2 [D1 and D2 mutations for hybrid P.1 and CAL.20C variants; K417T, L452R, E484K, N501Y- mod. 3]
NITNLCPFGEVFNATRFASVYAWNRKRISNCVADYSVLYNSASFSTFKCYGVSPTKLNDLCFTNVYADSFVIRGDEVRQIAPGQTGTIADYNYKLPDDFTGCVIAWNSNNLDSKVGGNYNYRYRLFRKSNLKPFERDISTEIYQAGSTPCNGVKGFNCYFPLQSYGFQPTYGVGYQPYRVVVLSFELLHAPATVCGPKKSTNLVKNKGSGGGGSGGGGSNITNLCPFGEVFNATRFASVYAWNRKRISNCVADYSVLYNSASFSTFKCYGVSPTKLNDLCFTNVYADSFVIRGDEVRQIAPGQTGTIADYNYKLPDDFTGCVIAWNSNNLDSKVGGNYNYRYRLFRKSNLKPFERDISTEIYQAGSTPCNGVKGFNCYFPLQSYGFQPTYGVGYQPYRVVVLSFELLHAPATVCGPKKSTNLVKNK

SEQ ID NO: 192 - DNA, 1278 bp, synthetic construct
  misc_feature 1..1278: note = (CTD_short_i)2 [D1 and D2 mutations for hybrid P.1 and CAL.20C variants; K417T, L452R, E484K, N501Y- mod. 3]
  source 1..1278: mol_type = other DNA
aatatcacaaacttgtgcccatttggggaggtcttcaatgccactcggtttgcatcagtatatgcatggaatcgtaaacggatatcaaattgcgttgctgactattcagtcctctataatagtgctagtttcagtacatttaaatgctacggagtatctcctactaagttgaatgacctttgcttcacaaatgtctatgctgacagttttgttattaggggtgacgaggtgcggcagattgcacccgggcaaacaggaaccatcgctgactacaattacaaacttcctgatgacttcactggttgtgtgattgcttggaattccaacaatctggattccaaagtgggtgggaattacaattacagatatagattgtttagaaaatctaacctcaagccattcgaacgggatataagcacagaaatctatcaggctgggagcacaccttgtaacggcgtaaaggggttcaattgctattttccacttcagtcatacggctttcaacccacctatggggtgggataccagccatatcgagtggtcgtactctctttcgagctgcttcatgcccccgcaaccgtgtgtggtcccaaaaaaagcaccaatctcgtcaagaataagggatcaggggggggcggatcaggcggtggaggcagcaacataactaatctttgtccattcggtgaagtctttaatgcaacccgttttgcttctgtgtatgcatggaacaggaaaagaatatccaattgcgttgccgactatagcgtcctttacaattctgcctcctttagcacatttaagtgttatggggtctcccccactaagctgaatgatctgtgtttcaccaacgtttatgcagactcctttgttatacggggggatgaagttcgacaaatagcacccgggcagacagggaccatcgctgactacaattacaagcttccagatgacttcactgggtgcgtaatcgcctggaacagtaacaacttggactctaaagtcggagggaattataattaccggtatcgtctcttccgcaaaagtaacttgaagccttttgagagggacatttccacagagatatatcaagcaggttccacaccatgcaacggcgtcaagggatttaattgttatttccccctccaatcatacggctttcagccaacttacggcgttggctaccaaccatacagagtcgtagtgctttcctttgaactgctgcacgcccctgccactgtgtgtggcccaaaaaagagcaccaatttggtaaagaacaag

SEQ ID NO: 193 - protein, 13 aa, synthetic construct
  REGION 1..13: note = Short
GSGGGGDGGGGSG

SEQ ID NO: 194 - DNA, 39 bp, synthetic construct; identical to SEQ ID NO: 66
  misc_feature 1..39: note = Short
  source 1..39: mol_type = other DNA

SEQ ID NO: 195 - protein, 25 aa, synthetic construct
  REGION 1..25: note = Medium
GSGGGGDSGGGGSGGGGSSGGGGSG

SEQ ID NO: 196 - DNA, 75 bp, synthetic construct
  misc_feature 1..75: note = Medium
  source 1..75: mol_type = other DNA
ggatccggcggcggcggtgactccgggggaggaggttccggcggcggaggatcgagcggtggtggcggctccgga

SEQ ID NO: 197 - protein, 32 aa, synthetic construct
  REGION 1..32: note = Long
GSGGGGDSGGGGSGGSGGSGGSGGGSGGGGSG

SEQ ID NO: 198 - DNA, 96 bp, synthetic construct
  misc_feature 1..96: note = Long
  source 1..96: mol_type = other DNA
ggatccggcggcggcggtgactccgggggcggaggttccggtggctctggtggctctggaggctcgggaggcggaagcggtggtggcggctccgga

SEQ ID NO: 199 - protein, 234 aa, synthetic construct
  REGION 1..234: note = SARS_short_h
RVVPSGDVVRFPNITNLCPFGEVFNATKFPSVYAWERKKISNCVADYSVLYNSTFFSTFKCYGVSATKLNDLCFSNVYADSFVVKGDDVRQIAPGQTGVIADYNYKLPDDFMGCVLAWNTRNIDATSTGNYNYKYRYLRHGKLRPFERDISNVPFSPDGKPCTPPALNCYWPLNDYGFYTTTGIGYQPYRVVVLSFELLNAPATVCGPKLSTDLIKNQCVNFNFNGLTGTGVLT

SEQ ID NO: 200 - DNA, 702 bp, synthetic construct
  misc_feature 1..702: note = SARS_short_h
  source 1..702: mol_type = other DNA
agggtagttccctcaggcgatgtagttagatttccaaacataaccaacttgtgccccttcggggaggtattcaacgccaccaagttccccagtgtatatgcctgggagcggaaaaagatttctaattgcgttgctgattatagcgtactgtacaatagtacatttttttcaaccttcaaatgctacggtgttagcgccactaagctcaatgacttgtgcttttcaaatgtgtacgctgacagctttgttgtaaaaggcgacgatgtccgacagatagcacctggacaaactggtgtgattgcagattacaattacaaattgcccgacgattttatggggtgtgtgctcgcatggaatacccggaacattgatgctacctcaacaggaaactataactacaagtatcgatacttgcgacacgggaaactgaggccatttgagcgtgacatatcaaatgtgccattttcccccgacggaaaaccatgtactcctcccgctctgaattgctactggcccctgaacgattacggattctatactactaccggcattggctatcaaccttacagggttgtagtccttagctttgagttgctcaacgctcctgcaaccgtatgtgggccaaagctctcaactgatctcatcaaaaatcagtgcgtcaattttaactttaatggcctgacaggtactggtgttcttact

SEQ ID NO: 201 - protein, 205 aa, synthetic construct
  REGION 1..205: note = SARS_short_i
NITNLCPFGEVFNATKFPSVYAWERKKISNCVADYSVLYNSTFFSTFKCYGVSATKLNDLCFSNVYADSFVVKGDDVRQIAPGQTGVIADYNYKLPDDFMGCVLAWNTRNIDATSTGNYNYKYRYLRHGKLRPFERDISNVPFSPDGKPCTPPALNCYWPLNDYGFYTTTGIGYQPYRVVVLSFELLNAPATVCGPKLSTDLIKN

SEQ ID NO: 202 - DNA, 615 bp, synthetic construct
  misc_feature 1..615: note = SARS_short_i
  source 1..615: mol_type = other DNA
aacataaccaacttgtgccccttcggggaggtattcaacgccaccaagttccccagtgtatatgcctgggagcggaaaaagatttctaattgcgttgctgattatagcgtactgtacaatagtacatttttttcaaccttcaaatgctacggtgttagcgccactaagctcaatgacttgtgcttttcaaatgtgtacgctgacagctttgttgtaaaaggcgacgatgtccgacagatagcacctggacaaactggtgtgattgcagattacaattacaaattgcccgacgattttatggggtgtgtgctcgcatggaatacccggaacattgatgctacctcaacaggaaactataactacaagtatcgatacttgcgacacgggaaactgaggccatttgagcgtgacatatcaaatgtgccattttcccccgacggaaaaccatgtactcctcccgctctgaattgctactggcccctgaacgattacggattctatactactaccggcattggctatcaaccttacagggttgtagtccttagctttgagttgctcaacgctcctgcaaccgtatgtgggccaaagctctcaactgatctcatcaaaaat

SEQ ID NO: 203 - protein, 232 aa, synthetic construct
  REGION 1..232: note = MERS_Lytic_a
SGSVVEQAEGVECDFSPLLSGTPPQVYNFKRLVFTNCNYNLTKLLSLFSVNDFTCSQISPAAIASNCYSSLILDYFSYPLSMKSDLSVSSAGPISQFNYKQSFSNPTCLILATVPHNLTTITKPLKYSYINKCSRLLSDDRTEVPQLVNANQYSPCVSIVPSTVWEDGDYYRKQLSPLEGGGWLVASGSTVAMTEQLQMGFGITVQYGTDTNSVCPKLEFANDTKIASQLGN

SEQ ID NO: 204 - DNA, 696 bp, synthetic construct
  misc_feature 1..696: note = MERS_Lytic_a
  source 1..696: mol_type = other DNA
tcagggtccgtagttgagcaggcagagggcgtagagtgcgacttctcccccttgctttccgggactccaccccaggtgtataattttaaaaggcttgtctttactaactgcaactacaacttgaccaaacttctgagtctgttttctgttaatgacttcacatgctctcaaatatcacctgccgctatcgctagtaactgttacagctctcttatcttggattatttctcttatcccctctctatgaaatctgatctcagtgtaagtagtgcaggacccatttcccagtttaattacaaacaatcattctcaaatccaacatgcttgatactggctactgtccctcataacctgaccacaatcactaaaccactcaagtattcatacatcaacaagtgttcccgcctcctgtcagacgatcgaacagaggtccctcagttggtaaacgctaatcaatattcaccatgcgtgagcattgtcccaagcaccgtctgggaagatggggattactataggaaacagttgtcacctcttgagggagggggctggttggtcgcatccggtagcacagtggctatgactgaacagctgcaaatgggtttcggcataaccgtgcagtatgggaccgatacaaactccgtgtgtccaaaattggaatttgctaacgacacaaaaatagcctcacagttgggtaat

SEQ ID NO: 205 - protein, 225 aa, synthetic construct
  REGION 1..225: note = MERS_Lytic_b
SGSVVEQAEGVECDFSPLLSGTPPQVYNFKRLVFTNCNYNLTKLLSLFSVNDFTCSQISPAAIASNCYSSLILDYFSYPLSMKSDLSVSSAGPISQFNYKQSFSNPTCLILATVPHNLTTITKPLKYSYINKCSRLLSDDRTEVPQLVNANQYSPCVSIVPSTVWEDGDYYRKQLSPLEGGGWLVASGSTVAMTEQLQMGFGITVQYGTDTNSVCPKLEFANDTK

SEQ ID NO: 206 - DNA, 675 bp, synthetic construct
  misc_feature 1..675: note = MERS_Lytic_b
  source 1..675: mol_type = other DNA
tcagggtccgtagttgagcaggcagagggcgtagagtgcgacttctcccccttgctttccgggactccaccccaggtgtataattttaaaaggcttgtctttactaactgcaactacaacttgaccaaacttctgagtctgttttctgttaatgacttcacatgctctcaaatatcacctgccgctatcgctagtaactgttacagctctcttatcttggattatttctcttatcccctctctatgaaatctgatctcagtgtaagtagtgcaggacccatttcccagtttaattacaaacaatcattctcaaatccaacatgcttgatactggctactgtccctcataacctgaccacaatcactaaaccactcaagtattcatacatcaacaagtgttcccgcctcctgtcagacgatcgaacagaggtccctcagttggtaaacgctaatcaatattcaccatgcgtgagcattgtcccaagcaccgtctgggaagatggggattactataggaaacagttgtcacctcttgagggagggggctggttggtcgcatccggtagcacagtggctatgactgaacagctgcaaatgggtttcggcataaccgtgcagtatgggaccgatacaaactccgtgtgtccaaaattggaatttgctaacgacacaaaa

SEQ ID NO: 207 - protein, 214 aa, synthetic construct
  REGION 1..214: note = MERS_Lytic_c
EQAEGVECDFSPLLSGTPPQVYNFKRLVFTNCNYNLTKLLSLFSVNDFTCSQISPAAIASNCYSSLILDYFSYPLSMKSDLSVSSAGPISQFNYKQSFSNPTCLILATVPHNLTTITKPLKYSYINKCSRLLSDDRTEVPQLVNANQYSPCVSIVPSTVWEDGDYYRKQLSPLEGGGWLVASGSTVAMTEQLQMGFGITVQYGTDTNSVCPKLE

SEQ ID NO: 208 - DNA, 642 bp, synthetic construct
  misc_feature 1..642: note = MERS_Lytic_c
  source 1..642: mol_type = other DNA
gagcaggcagagggcgtagagtgcgacttctcccccttgctttccgggactccaccccaggtgtataattttaaaaggcttgtctttactaactgcaactacaacttgaccaaacttctgagtctgttttctgttaatgacttcacatgctctcaaatatcacctgccgctatcgctagtaactgttacagctctcttatcttggattatttctcttatcccctctctatgaaatctgatctcagtgtaagtagtgcaggacccatttcccagtttaattacaaacaatcattctcaaatccaacatgcttgatactggctactgtccctcataacctgaccacaatcactaaaccactcaagtattcatacatcaacaagtgttcccgcctcctgtcagacgatcgaacagaggtccctcagttggtaaacgctaatcaatattcaccatgcgtgagcattgtcccaagcaccgtctgggaagatggggattactataggaaacagttgtcacctcttgagggagggggctggttggtcgcatccggtagcacagtggctatgactgaacagctgcaaatgggtttcggcataaccgtgcagtatgggaccgatacaaactccgtgtgtccaaaattggaa

SEQ ID NO: 209 - protein, 209 aa, synthetic construct
  REGION 1..209: note = MERS_Lytic_d
EGVECDFSPLLSGTPPQVYNFKRLVFTNCNYNLTKLLSLFSVNDFTCSQISPAAIASNCYSSLILDYFSYPLSMKSDLSVSSAGPISQFNYKQSFSNPTCLILATVPHNLTTITKPLKYSYINKCSRLLSDDRTEVPQLVNANQYSPCVSIVPSTVWEDGDYYRKQLSPLEGGGWLVASGSTVAMTEQLQMGFGITVQYGTDTNSVCPK

SEQ ID NO: 210 - DNA, 627 bp, synthetic construct
  misc_feature 1..627: note = MERS_Lytic_d
  source 1..627: mol_type = other DNA
gagggcgtagagtgcgacttctcccccttgctttccgggactccaccccaggtgtataattttaaaaggcttgtctttactaactgcaactacaacttgaccaaacttctgagtctgttttctgttaatgacttcacatgctctcaaatatcacctgccgctatcgctagtaactgttacagctctcttatcttggattatttctcttatcccctctctatgaaatctgatctcagtgtaagtagtgcaggacccatttcccagtttaattacaaacaatcattctcaaatccaacatgcttgatactggctactgtccctcataacctgaccacaatcactaaaccactcaagtattcatacatcaacaagtgttcccgcctcctgtcagacgatcgaacagaggtccctcagttggtaaacgctaatcaatattcaccatgcgtgagcattgtcccaagcaccgtctgggaagatggggattactataggaaacagttgtcacctcttgagggagggggctggttggtcgcatccggtagcacagtggctatgactgaacagctgcaaatgggtttcggcataaccgtgcagtatgggaccgatacaaactccgtgtgtccaaaa

SEQ ID NO: 211 - protein, 219 aa, synthetic construct
  REGION 1..219: note = MERS_Lytic_e
SGSVVEQAEGVECDFSPLLSGTPPQVYNFKRLVFTNCNYNLTKLLSLFSVNDFTCSQISPAAIASNCYSSLILDYFSYPLSMKSDLSVSSAGPISQFNYKQSFSNPTCLILATVPHNLTTITKPLKYSYINKCSRLLSDDRTEVPQLVNANQYSPCVSIVPSTVWEDGDYYRKQLSPLEGGGWLVASGSTVAMTEQLQMGFGITVQYGTDTNSVCPKLE

SEQ ID NO: 212 - DNA, 657 bp, synthetic construct
  misc_feature 1..657: note = MERS_Lytic_e
  source 1..657: mol_type = other DNA
tcagggtccgtagttgagcaggcagagggcgtagagtgcgacttctcccccttgctttccgggactccaccccaggtgtataattttaaaaggcttgtctttactaactgcaactacaacttgaccaaacttctgagtctgttttctgttaatgacttcacatgctctcaaatatcacctgccgctatcgctagtaactgttacagctctcttatcttggattatttctcttatcccctctctatgaaatctgatctcagtgtaagtagtgcaggacccatttcccagtttaattacaaacaatcattctcaaatccaacatgcttgatactggctactgtccctcataacctgaccacaatcactaaaccactcaagtattcatacatcaacaagtgttcccgcctcctgtcagacgatcgaacagaggtccctcagttggtaaacgctaatcaatattcaccatgcgtgagcattgtcccaagcaccgtctgggaagatggggattactataggaaacagttgtcacctcttgagggagggggctggttggtcgcatccggtagcacagtggctatgactgaacagctgcaaatgggtttcggcataaccgtgcagtatgggaccgatacaaactccgtgtgtccaaaattggaa

SEQ ID NO: 213 - protein, 220 aa, synthetic construct
  REGION 1..220: note = MERS_Lytic_f
EQAEGVECDFSPLLSGTPPQVYNFKRLVFTNCNYNLTKLLSLFSVNDFTCSQISPAAIASNCYSSLILDYFSYPLSMKSDLSVSSAGPISQFNYKQSFSNPTCLILATVPHNLTTITKPLKYSYINKCSRLLSDDRTEVPQLVNANQYSPCVSIVPSTVWEDGDYYRKQLSPLEGGGWLVASGSTVAMTEQLQMGFGITVQYGTDTNSVCPKLEFANDTK

SEQ ID NO: 214 - DNA, 660 bp, synthetic construct
  misc_feature 1..660: note = MERS_Lytic_f
  source 1..660: mol_type = other DNA
gagcaggcagagggcgtagagtgcgacttctcccccttgctttccgggactccaccccaggtgtataattttaaaaggcttgtctttactaactgcaactacaacttgaccaaacttctgagtctgttttctgttaatgacttcacatgctctcaaatatcacctgccgctatcgctagtaactgttacagctctcttatcttggattatttctcttatcccctctctatgaaatctgatctcagtgtaagtagtgcaggacccatttcccagtttaattacaaacaatcattctcaaatccaacatgcttgatactggctactgtccctcataacctgaccacaatcactaaaccactcaagtattcatacatcaacaagtgttcccgcctcctgtcagacgatcgaacagaggtccctcagttggtaaacgctaatcaatattcaccatgcgtgagcattgtcccaagcaccgtctgggaagatggggattactataggaaacagttgtcacctcttgagggagggggctggttggtcgcatccggtagcacagtggctatgactgaacagctgcaaatgggtttcggcataaccgtgcagtatgggaccgatacaaactccgtgtgtccaaaattggaatttgctaacgacacaaaa

SEQ ID NO: 215 - protein, 217 aa, synthetic construct
  REGION 1..217: note = MERS_Lytic_g
EGVECDFSPLLSGTPPQVYNFKRLVFTNCNYNLTKLLSLFSVNDFTCSQISPAAIASNCYSSLILDYFSYPLSMKSDLSVSSAGPISQFNYKQSFSNPTCLILATVPHNLTTITKPLKYSYINKCSRLLSDDRTEVPQLVNANQYSPCVSIVPSTVWEDGDYYRKQLSPLEGGGWLVASGSTVAMTEQLQMGFGITVQYGTDTNSVCPKLEFANDTK

SEQ ID NO: 216 - DNA, 651 bp, synthetic construct
  misc_feature 1..651: note = MERS_Lytic_g
  source 1..651: mol_type = other DNA
gagggcgtagagtgcgacttctcccccttgctttccgggactccaccccaggtgtataattttaaaaggcttgtctttactaactgcaactacaacttgaccaaacttctgagtctgttttctgttaatgacttcacatgctctcaaatatcacctgccgctatcgctagtaactgttacagctctcttatcttggattatttctcttatcccctctctatgaaatctgatctcagtgtaagtagtgcaggacccatttcccagtttaattacaaacaatcattctcaaatccaacatgcttgatactggctactgtccctcataacctgaccacaatcactaaaccactcaagtattcatacatcaacaagtgttcccgcctcctgtcagacgatcgaacagaggtccctcagttggtaaacgctaatcaatattcaccatgcgtgagcattgtcccaagcaccgtctgggaagatggggattactataggaaacagttgtcacctcttgagggagggggctggttggtcgcatccggtagcacagtggctatgactgaacagctgcaaatgggtttcggcataaccgtgcagtatgggaccgatacaaactccgtgtgtccaaaattggaatttgctaacgacacaaaa

SEQ ID NO: 217 - protein, 699 aa, synthetic construct
  REGION 1..699: note = Ma_l1_Sh_l2_S2
SGSVVEQAEGVECDFSPLLSGTPPQVYNFKRLVFTNCNYNLTKLLSLFSVNDFTCSQISPAAIASNCYSSLILDYFSYPLSMKSDLSVSSAGPISQFNYKQSFSNPTCLILATVPHNLTTITKPLKYSYINKCSRLLSDDRTEVPQLVNANQYSPCVSIVPSTVWEDGDYYRKQLSPLEGGGWLVASGSTVAMTEQLQMGFGITVQYGTDTNSVCPKLEFANDTKIASQLGNSGGGSGGGSGGGSRVVPSGDVVRFPNITNLCPFGEVFNATKFPSVYAWERKKISNCVADYSVLYNSTFFSTFKCYGVSATKLNDLCFSNVYADSFVVKGDDVRQIAPGQTGVIADYNYKLPDDFMGCVLAWNTRNIDATSTGNYNYKYRYLRHGKLRPFERDISNVPFSPDGKPCTPPALNCYWPLNDYGFYTTTGIGYQPYRVVVLSFELLNAPATVCGPKLSTDLIKNQCVNFNFNGLTGTGVLTSGGSGGSGGSGGSNITNLCPFGEVFNATRFASVYAWNRKRISNCVADYSVLYNSASFSTFKCYGVSPTKLNDLCFTNVYADSFVIRGDEVRQIAPGQTGKIADYNYKLPDDFTGCVIAWNSNNLDSKVGGNYNYLYRLFRKSNLKPFERDISTEIYQAGSTPCNGVEGFNCYFPLQSYGFQPTNGVGYQPYRVVVLSFELLHAPATVCGPKKSTNLVKNK

SEQ ID NO: 218 - DNA, 2097 bp, synthetic construct
  misc_feature 1..2097: note = Ma_l1_Sh_l2_S2
  source 1..2097: mol_type = other DNA
tcagggtccgtagttgagcaggcagagggcgtagagtgcgacttctcccccttgctttccgggactccaccccaggtgtataattttaaaaggcttgtctttactaactgcaactacaacttgaccaaacttctgagtctgttttctgttaatgacttcacatgctctcaaatatcacctgccgctatcgctagtaactgttacagctctcttatcttggattatttctcttatcccctctctatgaaatctgatctcagtgtaagtagtgcaggacccatttcccagtttaattacaaacaatcattctcaaatccaacatgcttgatactggctactgtccctcataacctgaccacaatcactaaaccactcaagtattcatacatcaacaagtgttcccgcctcctgtcagacgatcgaacagaggtccctcagttggtaaacgctaatcaatattcaccatgcgtgagcattgtcccaagcaccgtctgggaagatggggattactataggaaacagttgtcacctcttgagggagggggctggttggtcgcatccggtagcacagtggctatgactgaacagctgcaaatgggtttcggcataaccgtgcagtatgggaccgatacaaactccgtgtgtccaaaattggaatttgctaacgacacaaaaatagcctcacagttgggtaattctgggggaggaagtggagggggtagtggtggaggaagtagggtagttccctcaggcgatgtagttagatttccaaacataaccaacttgtgccccttcggggaggtattcaacgccaccaagttccccagtgtatatgcctgggagcggaaaaagatttctaattgcgttgctgattatagcgtactgtacaatagtacatttttttcaaccttcaaatgctacggtgttagcgccactaagctcaatgacttgtgcttttcaaatgtgtacgctgacagctttgttgtaaaaggcgacgatgtccgacagatagcacctggacaaactggtgtgattgcagattacaattacaaattgcccgacgattttatggggtgtgtgctcgcatggaatacccggaacattgatgctacctcaacaggaaactataactacaagtatcgatacttgcgacacgggaaactgaggccatttgagcgtgacatatcaaatgtgccattttcccccgacggaaaaccatgtactcctcccgctctgaattgctactggcccctgaacgattacggattctatactactaccggcattggctatcaaccttacagggttgtagtccttagctttgagttgctcaacgctcctgcaaccgtatgtgggccaaagctctcaactgatctcatcaaaaatcagtgcgtcaattttaactttaatggcctgacaggtactggtgttcttactagcggcggatcagggggtagcggcggctccggtggctctaatatcactaatctttgccccttcggggaagtatttaacgctactcgatttgctagcgtatatgcctggaaccggaagagaataagcaactgtgttgcagactatagcgtgctttacaattccgcatcctttagtaccttcaaatgttacggtgtgagccccaccaaactcaatgatctctgtttcacaaacgtgtacgcagatagtttcgttatacgcggggacgaagtacggcagatagcccctggccagacaggaaagatagccgattacaactacaaacttccagacgattttacagggtgtgtgatcgcttggaattcaaataacctggactccaaagtgggaggcaactataattacctgtaccgactgttccgcaaaagcaacttgaaacctttcgagcgagatatatcaaccgaaatctaccaagctggttctacaccttgtaatggtgtggagggatttaactgctacttccctcttcagtcctatggatttcagcctacaaatggagtcgggtatcaaccctatagagtcgtggtgttgtcatttgaacttctccatgcacctgctactgtctgtggtccaaaaaagtccactaatcttgtaaaaaacaaa

SEQ ID NO: 219 - protein, 670 aa, synthetic construct
  REGION 1..670: note = Ma_l1_Si_l2_S2
SGSVVEQAEGVECDFSPLLSGTPPQVYNFKRLVFTNCNYNLTKLLSLFSVNDFTCSQISPAAIASNCYSSLILDYFSYPLSMKSDLSVSSAGPISQFNYKQSFSNPTCLILATVPHNLTTITKPLKYSYINKCSRLLSDDRTEVPQLVNANQYSPCVSIVPSTVWEDGDYYRKQLSPLEGGGWLVASGSTVAMTEQLQMGFGITVQYGTDTNSVCPKLEFANDTKIASQLGNSGGGSGGGSGGGSNITNLCPFGEVFNATKFPSVYAWERKKISNCVADYSVLYNSTFFSTFKCYGVSATKLNDLCFSNVYADSFVVKGDDVRQIAPGQTGVIADYNYKLPDDFMGCVLAWNTRNIDATSTGNYNYKYRYLRHGKLRPFERDISNVPFSPDGKPCTPPALNCYWPLNDYGFYTTTGIGYQPYRVVVLSFELLNAPATVCGPKLSTDLIKNSGGSGGSGGSGGSNITNLCPFGEVFNATRFASVYAWNRKRISNCVADYSVLYNSASFSTFKCYGVSPTKLNDLCFTNVYADSFVIRGDEVRQIAPGQTGKIADYNYKLPDDFTGCVIAWNSNNLDSKVGGNYNYLYRLFRKSNLKPFERDISTEIYQAGSTPCNGVEGFNCYFPLQSYGFQPTNGVGYQPYRVVVLSFELLHAPATVCGPKKSTNLVKNK

SEQ ID NO: 220 - DNA, 2010 bp, synthetic construct
  misc_feature 1..2010: note = Ma_l1_Si_l2_S2
  source 1..2010: mol_type = other DNA
tcagggtccgtagttgagcaggcagagggcgtagagtgcgacttctcccccttgctttccgggactccaccccaggtgtataattttaaaaggcttgtctttactaactgcaactacaacttgaccaaacttctgagtctgttttctgttaatgacttcacatgctctcaaatatcacctgccgctatcgctagtaactgttacagctctcttatcttggattatttctcttatcccctctctatgaaatctgatctcagtgtaagtagtgcaggacccatttcccagtttaattacaaacaatcattctcaaatccaacatgcttgatactggctactgtccctcataacctgaccacaatcactaaaccactcaagtattcatacatcaacaagtgttcccgcctcctgtcagacgatcgaacagaggtccctcagttggtaaacgctaatcaatattcaccatgcgtgagcattgtcccaagcaccgtctgggaagatggggattactataggaaacagttgtcacctcttgagggagggggctggttggtcgcatccggtagcacagtggctatgactgaacagctgcaaatgggtttcggcataaccgtgcagtatgggaccgatacaaactccgtgtgtccaaaattggaatttgctaacgacacaaaaatagcctcacagttgggtaattctgggggaggaagtggagggggtagtggtggaggaagtaacataaccaacttgtgccccttcggggaggtattcaacgccaccaagttccccagtgtatatgcctgggagcggaaaaagatttctaattgcgttgctgattatagcgtactgtacaatagtacatttttttcaaccttcaaatgctacggtgttagcgccactaagctcaatgacttgtgcttttcaaatgtgtacgctgacagctttgttgtaaaaggcgacgatgtccgacagatagcacctggacaaactggtgtgattgcagattacaattacaaattgcccgacgattttatggggtgtgtgctcgcatggaatacccggaacattgatgctacctcaacaggaaactataactacaagtatcgatacttgcgacacgggaaactgaggccatttgagcgtgacatatcaaatgtgccattttcccccgacggaaaaccatgtactcctcccgctctgaattgctactggcccctgaacgattacggattctatactactaccggcattggctatcaaccttacagggttgtagtccttagctttgagttgctcaacgctcctgcaaccgtatgtgggccaaagctctcaactgatctcatcaaaaatagcggcggatcagggggtagcggcggctccggtggctctaatatcactaatctttgccccttcggggaagtatttaacgctactcgatttgctagcgtatatgcctggaaccggaagagaataagcaactgtgttgcagactatagcgtgctttacaattccgcatcctttagtaccttcaaatgttacggtgtgagccccaccaaactcaatgatctctgtttcacaaacgtgtacgcagatagtttcgttatacgcggggacgaagtacggcagatagcccctggccagacaggaaagatagccgattacaactacaaacttccagacgattttacagggtgtgtgatcgcttggaattcaaataacctggactccaaagtgggaggcaactataattacctgtaccgactgttccgcaaaagcaacttgaaacctttcgagcgagatatatcaaccgaaatctaccaagctggttctacaccttgtaatggtgtggagggatttaactgctacttccctcttcagtcctatggatttcagcctacaaatggagtcgggtatcaaccctatagagtcgtggtgttgtcatttgaacttctccatgcacctgctactgtctgtggtccaaaaaagtccactaatcttgtaaaaaacaaa

SEQ ID NO: 221 - protein, 692 aa, synthetic construct
  REGION 1..692: note = Mb_l1_Sh_l2_S2
SGSVVEQAEGVECDFSPLLSGTPPQVYNFKRLVFTNCNYNLTKLLSLFSVNDFTCSQISPAAIASNCYSSLILDYFSYPLSMKSDLSVSSAGPISQFNYKQSFSNPTCLILATVPHNLTTITKPLKYSYINKCSRLLSDDRTEVPQLVNANQYSPCVSIVPSTVWEDGDYYRKQLSPLEGGGWLVASGSTVAMTEQLQMGFGITVQYGTDTNSVCPKLEFANDTKSGGGSGGGSGGGSRVVPSGDVVRFPNITNLCPFGEVFNATKFPSVYAWERKKISNCVADYSVLYNSTFFSTFKCYGVSATKLNDLCFSNVYADSFVVKGDDVRQIAPGQTGVIADYNYKLPDDFMGCVLAWNTRNIDATSTGNYNYKYRYLRHGKLRPFERDISNVPFSPDGKPCTPPALNCYWPLNDYGFYTTTGIGYQPYRVVVLSFELLNAPATVCGPKLSTDLIKNQCVNFNFNGLTGTGVLTSGGSGGSGGSGGSNITNLCPFGEVFNATRFASVYAWNRKRISNCVADYSVLYNSASFSTFKCYGVSPTKLNDLCFTNVYADSFVIRGDEVRQIAPGQTGKIADYNYKLPDDFTGCVIAWNSNNLDSKVGGNYNYLYRLFRKSNLKPFERDISTEIYQAGSTPCNGVEGFNCYFPLQSYGFQPTNGVGYQPYRVVVLSFELLHAPATVCGPKKSTNLVKNK

SEQ ID NO: 222 - DNA, 2076 bp, synthetic construct
  misc_feature 1..2076: note = Mb_l1_Sh_l2_S2
  source 1..2076: mol_type = other DNA
tcagggtccgtagttgagcaggcagagggcgtagagtgcgacttctcccccttgctttccgggactccaccccaggtgtataattttaaaaggcttgtctttactaactgcaactacaacttgaccaaacttctgagtctgttttctgttaatgacttcacatgctctcaaatatcacctgccgctatcgctagtaactgttacagctctcttatcttggattatttctcttatcccctctctatgaaatctgatctcagtgtaagtagtgcaggacccatttcccagtttaattacaaacaatcattctcaaatccaacatgcttgatactggctactgtccctcataacctgaccacaatcactaaaccactcaagtattcatacatcaacaagtgttcccgcctcctgtcagacgatcgaacagaggtccctcagttggtaaacgctaatcaatattcaccatgcgtgagcattgtcccaagcaccgtctgggaagatggggattactataggaaacagttgtcacctcttgagggagggggctggttggtcgcatccggtagcacagtggctatgactgaacagctgcaaatgggtttcggcataaccgtgcagtatgggaccgatacaaactccgtgtgtccaaaattggaatttgctaacgacacaaaatctgggggaggaagtggagggggtagtggtggaggaagtagggtagttccctcaggcgatgtagttagatttccaaacataaccaacttgtgccccttcggggaggtattcaacgccaccaagttccccagtgtatatgcctgggagcggaaaaagatttctaattgcgttgctgattatagcgtactgtacaatagtacatttttttcaaccttcaaatgctacggtgttagcgccactaagctcaatgacttgtgcttttcaaatgtgtacgctgacagctttgttgtaaaaggcgacgatgtccgacagatagcacctggacaaactggtgtgattgcagattacaattacaaattgcccgacgattttatggggtgtgtgctcgcatggaatacccggaacattgatgctacctcaacaggaaactataactacaagtatcgatacttgcgacacgggaaactgaggccatttgagcgtgacatatcaaatgtgccattttcccccgacggaaaaccatgtactcctcccgctctgaattgctactggcccctgaacgattacggattctatactactaccggcattggctatcaaccttacagggttgtagtccttagctttgagttgctcaacgctcctgcaaccgtatgtgggccaaagctctcaactgatctcatcaaaaatcagtgcgtcaattttaactttaatggcctgacaggtactggtgttcttactagcggcggatcagggggtagcggcggctccggtggctctaatatcactaatctttgccccttcggggaagtatttaacgctactcgatttgctagcgtatatgcctggaaccggaagagaataagcaactgtgttgcagactatagcgtgctttacaattccgcatcctttagtaccttcaaatgttacggtgtgagccccaccaaactcaatgatctctgtttcacaaacgtgtacgcagatagtttcgttatacgcggggacgaagtacggcagatagcccctggccagacaggaaagatagccgattacaactacaaacttccagacgattttacagggtgtgtgatcgcttggaattcaaataacctggactccaaagtgggaggcaactataattacctgtaccgactgttccgcaaaagcaacttgaaacctttcgagcgagatatatcaaccgaaatctaccaagctggttctacaccttgtaatggtgtggagggatttaactgctacttccctcttcagtcctatggatttcagcctacaaatggagtcgggtatcaaccctatagagtcgtggtgttgtcatttgaacttctccatgcacctgctactgtctgtggtccaaaaaagtccactaatcttgtaaaaaacaaa

SEQ ID NO: 223 - protein, 663 aa, synthetic construct
  REGION 1..663: note = Mb_l1_Si_l2_S2
SGSVVEQAEGVECDFSPLLSGTPPQVYNFKRLVFTNCNYNLTKLLSLFSVNDFTCSQISPAAIASNCYSSLILDYFSYPLSMKSDLSVSSAGPISQFNYKQSFSNPTCLILATVPHNLTTITKPLKYSYINKCSRLLSDDRTEVPQLVNANQYSPCVSIVPSTVWEDGDYYRKQLSPLEGGGWLVASGSTVAMTEQLQMGFGITVQYGTDTNSVCPKLEFANDTKSGGGSGGGSGGGSNITNLCPFGEVFNATKFPSVYAWERKKISNCVADYSVLYNSTFFSTFKCYGVSATKLNDLCFSNVYADSFVVKGDDVRQIAPGQTGVIADYNYKLPDDFMGCVLAWNTRNIDATSTGNYNYKYRYLRHGKLRPFERDISNVPFSPDGKPCTPPALNCYWPLNDYGFYTTTGIGYQPYRVVVLSFELLNAPATVCGPKLSTDLIKNSGGSGGSGGSGGSNITNLCPFGEVFNATRFASVYAWNRKRISNCVADYSVLYNSASFSTFKCYGVSPTKLNDLCFTNVYADSFVIRGDEVRQIAPGQTGKIADYNYKLPDDFTGCVIAWNSNNLDSKVGGNYNYLYRLFRKSNLKPFERDISTEIYQAGSTPCNGVEGFNCYFPLQSYGFQPTNGVGYQPYRVVVLSFELLHAPATVCGPKKSTNLVKNK

SEQ ID NO: 224 - DNA, 1989 bp, synthetic construct
  misc_feature 1..1989: note = Mb_l1_Si_l2_S2
  source 1..1989: mol_type = other DNA
tcagggtccgtagttgagcaggcagagggcgtagagtgcgacttctcccccttgctttccgggactccaccccaggtgtataattttaaaaggcttgtctttactaactgcaactacaacttgaccaaacttctgagtctgttttctgttaatgacttcacatgctctcaaatatcacctgccgctatcgctagtaactgttacagctctcttatcttggattatttctcttatcccctctctatgaaatctgatctcagtgtaagtagtgcaggacccatttcccagtttaattacaaacaatcattctcaaatccaacatgcttgatactggctactgtccctcataacctgaccacaatcactaaaccactcaagtattcatacatcaacaagtgttcccgcctcctgtcagacgatcgaacagaggtccctcagttggtaaacgctaatcaatattcaccatgcgtgagcattgtcccaagcaccgtctgggaagatggggattactataggaaacagttgtcacctcttgagggagggggctggttggtcgcatccggtagcacagtggctatgactgaacagctgcaaatgggtttcggcataaccgtgcagtatgggaccgatacaaactccgtgtgtccaaaattggaatttgctaacgacacaaaatctgggggaggaagtggagggggtagtggtggaggaagtaacataaccaacttgtgccccttcggggaggtattcaacgccaccaagttccccagtgtatatgcctgggagcggaaaaagatttctaattgcgttgctgattatagcgtactgtacaatagtacatttttttcaaccttcaaatgctacggtgttagcgccactaagctcaatgacttgtgcttttcaaatgtgtacgctgacagctttgttgtaaaaggcgacgatgtccgacagatagcacctggacaaactggtgtgattgcagattacaattacaaattgcccgacgattttatggggtgtgtgctcgcatggaatacccggaacattgatgctacctcaacaggaaactataactacaagtatcgatacttgcgacacgggaaactgaggccatttgagcgtgacatatcaaatgtgccattttcccccgacggaaaaccatgtactcctcccgctctgaattgctactggcccctgaacgattacggattctatactactaccggcattggctatcaaccttacagggttgtagtccttagctttgagttgctcaacgctcctgcaaccgtatgtgggccaaagctctcaactgatctcatcaaaaatagcggcggatcagggggtagcggcggctccggtggctctaatatcactaatctttgccccttcggggaagtatttaacgctactcgatttgctagcgtatatgcctggaaccggaagagaataagcaactgtgttgcagactatagcgtgctttacaattccgcatcctttagtaccttcaaatgttacggtgtgagccccaccaaactcaatgatctctgtttcacaaacgtgtacgcagatagtttcgttatacgcggggacgaagtacggcagatagcccctggccagacaggaaagatagccgattacaactacaaacttccagacgattttacagggtgtgtgatcgcttggaattcaaataacctggactccaaagtgggaggcaactataattacctgtaccgactgttccgcaaaagcaacttgaaacctttcgagcgagatatatcaaccgaaatctaccaagctggttctacaccttgtaatggtgtggagggatttaactgctacttccctcttcagtcctatggatttcagcctacaaatggagtcgggtatcaaccctatagagtcgtggtgttgtcatttgaacttctccatgcacctgctactgtctgtggtccaaaaaagtccactaatcttgtaaaaaacaaa

SEQ ID NO: 225 - protein, 681 aa, synthetic construct
  REGION 1..681: note = Mc_l1_Sh_l2_S2
EQAEGVECDFSPLLSGTPPQVYNFKRLVFTNCNYNLTKLLSLFSVNDFTCSQISPAAIASNCYSSLILDYFSYPLSMKSDLSVSSAGPISQFNYKQSFSNPTCLILATVPHNLTTITKPLKYSYINKCSRLLSDDRTEVPQLVNANQYSPCVSIVPSTVWEDGDYYRKQLSPLEGGGWLVASGSTVAMTEQLQMGFGITVQYGTDTNSVCPKLESGGGSGGGSGGGSRVVPSGDVVRFPNITNLCPFGEVFNATKFPSVYAWERKKISNCVADYSVLYNSTFFSTFKCYGVSATKLNDLCFSNVYADSFVVKGDDVRQIAPGQTGVIADYNYKLPDDFMGCVLAWNTRNIDATSTGNYNYKYRYLRHGKLRPFERDISNVPFSPDGKPCTPPALNCYWPLNDYGFYTTTGIGYQPYRVVVLSFELLNAPATVCGPKLSTDLIKNQCVNFNFNGLTGTGVLTSGGSGGSGGSGGSNITNLCPFGEVFNATRFASVYAWNRKRISNCVADYSVLYNSASFSTFKCYGVSPTKLNDLCFTNVYADSFVIRGDEVRQIAPGQTGKIADYNYKLPDDFTGCVIAWNSNNLDSKVGGNYNYLYRLFRKSNLKPFERDISTEIYQAGSTPCNGVEGFNCYFPLQSYGFQPTNGVGYQPYRVVVLSFELLHAPATVCGPKKSTNLVKNK

SEQ ID NO: 226 - DNA, 2043 bp, synthetic construct
  misc_feature 1..2043: note = Mc_l1_Sh_l2_S2
  source 1..2043: mol_type = other DNA
gagcaggcagagggcgtagagtgcgacttctcccccttgctttccgggactccaccccaggtgtataattttaaaaggcttgtctttactaactgcaactacaacttgaccaaacttctgagtctgttttctgttaatgacttcacatgctctcaaatatcacctgccgctatcgctagtaactgttacagctctcttatcttggattatttctcttatcccctctctatgaaatctgatctcagtgtaagtagtgcaggacccatttcccagtttaattacaaacaatcattctcaaatccaacatgcttgatactggctactgtccctcataacctgaccacaatcactaaaccactcaagtattcatacatcaacaagtgttcccgcctcctgtcagacgatcgaacagaggtccctcagttggtaaacgctaatcaatattcaccatgcgtgagcattgtcccaagcaccgtctgggaagatggggattactataggaaacagttgtcacctcttgagggagggggctggttggtcgcatccggtagcacagtggctatgactgaacagctgcaaatgggtttcggcataaccgtgcagtatgggaccgatacaaactccgtgtgtccaaaattggaatctgggggaggaagtggagggggtagtggtggaggaagtagggtagttccctcaggcgatgtagttagatttccaaacataaccaacttgtgccccttcggggaggtattcaacgccaccaagttccccagtgtatatgcctgggagcggaaaaagatttctaattgcgttgctgattatagcgtactgtacaatagtacatttttttcaaccttcaaatgctacggtgttagcgccactaagctcaatgacttgtgcttttcaaatgtgtacgctgacagctttgttgtaaaaggcgacgatgtccgacagatagcacctggacaaactggtgtgattgcagattacaattacaaattgcccgacgattttatggggtgtgtgctcgcatggaatacccggaacattgatgctacctcaacaggaaactataactacaagtatcgatacttgcgacacgggaaactgaggccatttgagcgtgacatatcaaatgtgccattttcccccgacggaaaaccatgtactcctcccgctctgaattgctactggcccctgaacgattacggattctatactactaccggcattggctatcaaccttacagggttgtagtccttagctttgagttgctcaacgctcctgcaaccgtatgtgggccaaagctctcaactgatctcatcaaaaatcagtgcgtcaattttaactttaatggcctgacaggtactggtgttcttactagcggcggatcagggggtagcggcggctccggtggctctaatatcactaatctttgccccttcggggaagtatttaacgctactcgatttgctagcgtatatgcctggaaccggaagagaataagcaactgtgttgcagactatagcgtgctttacaattccgcatcctttagtaccttcaaatgttacggtgtgagccccaccaaactcaatgatctctgtttcacaaacgtgtacgcagatagtttcgttatacgcggggacgaagtacggcagatagcccctggccagacaggaaagatagccgattacaactacaaacttccagacgattttacagggtgtgtgatcgcttggaattcaaataacctggactccaaagtgggaggcaactataattacctgtaccgactgttccgcaaaagcaacttgaaacctttcgagcgagatatatcaaccgaaatctaccaagctggttctacaccttgtaatggtgtggagggatttaactgctacttccctcttcagtcctatggatttcagcctacaaatggagtcgggtatcaaccctatagagtcgtggtgttgtcatttgaacttctccatgcacctgctactgtctgtggtccaaaaaagtccactaatcttgtaaaaaacaaa

SEQ ID NO: 227 - protein, 652 aa, synthetic construct
  REGION 1..652: note = Mc_l1_Si_l2_S2
EQAEGVECDFSPLLSGTPPQVYNFKRLVFTNCNYNLTKLLSLFSVNDFTCSQISPAAIASNCYSSLILDYFSYPLSMKSDLSVSSAGPISQFNYKQSFSNPTCLILATVPHNLTTITKPLKYSYINKCSRLLSDDRTEVPQLVNANQYSPCVSIVPSTVWEDGDYYRKQLSPLEGGGWLVASGSTVAMTEQLQMGFGITVQYGTDTNSVCPKLESGGGSGGGSGGGSNITNLCPFGEVFNATKFPSVYAWERKKISNCVADYSVLYNSTFFSTFKCYGVSATKLNDLCFSNVYADSFVVKGDDVRQIAPGQTGVIADYNYKLPDDFMGCVLAWNTRNIDATSTGNYNYKYRYLRHGKLRPFERDISNVPFSPDGKPCTPPALNCYWPLNDYGFYTTTGIGYQPYRVVVLSFELLNAPATVCGPKLSTDLIKNSGGSGGSGGSGGSNITNLCPFGEVFNATRFASVYAWNRKRISNCVADYSVLYNSASFSTFKCYGVSPTKLNDLCFTNVYADSFVIRGDEVRQIAPGQTGKIADYNYKLPDDFTGCVIAWNSNNLDSKVGGNYNYLYRLFRKSNLKPFERDISTEIYQAGSTPCNGVEGFNCYFPLQSYGFQPTNGVGYQPYRVVVLSFELLHAPATVCGPKKSTNLVKNK

SEQ ID NO: 228 - DNA, 1956 bp, synthetic construct
  misc_feature 1..1956: note = Mc_l1_Si_l2_S2
  source 1..1956: mol_type = other DNA
gagcaggcagagggcgtagagtgcgacttctcccccttgctttccgggactccaccccaggtgtataattttaaaaggcttgtctttactaactgcaactacaacttgaccaaacttctgagtctgttttctgttaatgacttcacatgctctcaaatatcacctgccgctatcgctagtaactgttacagctctcttatcttggattatttctcttatcccctctctatgaaatctgatctcagtgtaagtagtgcaggacccatttcccagtttaattacaaacaatcattctcaaatccaacatgcttgatactggctactgtccctcataacctgaccacaatcactaaaccactcaagtattcatacatcaacaagtgttcccgcctcctgtcagacgatcgaacagaggtccctcagttggtaaacgctaatcaatattcaccatgcgtgagcattgtcccaagcaccgtctgggaagatggggattactataggaaacagttgtcacctcttgagggagggggctggttggtcgcatccggtagcacagtggctatgactgaacagctgcaaatgggtttcggcataaccgtgcagtatgggaccgatacaaactccgtgtgtccaaaattggaatctgggggaggaagtggagggggtagtggtggaggaagtaacataaccaacttgtgccccttcggggaggtattcaacgccaccaagttccccagtgtatatgcctgggagcggaaaaagatttctaattgcgttgctgattatagcgtactgtacaatagtacatttttttcaaccttcaaatgctacggtgttagcgccactaagctcaatgacttgtgcttttcaaatgtgtacgctgacagctttgttgtaaaaggcgacgatgtccgacagatagcacctggacaaactggtgtgattgcagattacaattacaaattgcccgacgattttatggggtgtgtgctcgcatggaatacccggaacattgatgctacctcaacaggaaactataactacaagtatcgatacttgcgacacgggaaactgaggccatttgagcgtgacatatcaaatgtgccattttcccccgacggaaaaccatgtactcctcccgctctgaattgctactggcccctgaacgattacggattctatactactaccggcattggctatcaaccttacagggttgtagtccttagctttgagttgctcaacgctcctgcaaccgtatgtgggccaaagctctcaactgatctcatcaaaaatagcggcggatcagggggtagcggcggctccggtggctctaatatcactaatctttgccccttcggggaagtatttaacgctactcgatttgctagcgtatatgcctggaaccggaagagaataagcaactgtgttgcagactatagcgtgctttacaattccgcatcctttagtaccttcaaatgttacggtgtgagccccaccaaactcaatgatctctgtttcacaaacgtgtacgcagatagtttcgttatacgcggggacgaagtacggcagatagcccctggccagacaggaaagatagccgattacaactacaaacttccagacgattttacagggtgtgtgatcgcttggaattcaaataacctggactccaaagtgggaggcaactataattacctgtaccgactgttccgcaaaagcaacttgaaacctttcgagcgagatatatcaaccgaaatctaccaagctggttctacaccttgtaatggtgtggagggatttaactgctacttccctcttcagtcctatggatttcagcctacaaatggagtcgggtatcaaccctatagagtcgtggtgttgtcatttgaacttctccatgcacctgctactgtctgtggtccaaaaaagtccactaatcttgtaaaaaacaaa

SEQ ID NO: 229 - protein, 676 aa, synthetic construct
  REGION 1..676: note = Md_l1_Sh_l2_S2
EGVECDFSPLLSGTPPQVYNFKRLVFTNCNYNLTKLLSLFSVNDFTCSQISPAAIASNCYSSLILDYFSYPLSMKSDLSVSSAGPISQFNYKQSFSNPTCLILATVPHNLTTITKPLKYSYINKCSRLLSDDRTEVPQLVNANQYSPCVSIVPSTVWEDGDYYRKQLSPLEGGGWLVASGSTVAMTEQLQMGFGITVQYGTDTNSVCPKSGGGSGGGSGGGSRVVPSGDVVRFPNITNLCPFGEVFNATKFPSVYAWERKKISNCVADYSVLYNSTFFSTFKCYGVSATKLNDLCFSNVYADSFVVKGDDVRQIAPGQTGVIADYNYKLPDDFMGCVLAWNTRNIDATSTGNYNYKYRYLRHGKLRPFERDISNVPFSPDGKPCTPPALNCYWPLNDYGFYTTTGIGYQPYRVVVLSFELLNAPATVCGPKLSTDLIKNQCVNFNFNGLTGTGVLTSGGSGGSGGSGGSNITNLCPFGEVFNATRFASVYAWNRKRISNCVADYSVLYNSASFSTFKCYGVSPTKLNDLCFTNVYADSFVIRGDEVRQIAPGQTGKIADYNYKLPDDFTGCVIAWNSNNLDSKVGGNYNYLYRLFRKSNLKPFERDISTEIYQAGSTPCNGVEGFNCYFPLQSYGFQPTNGVGYQPYRVVVLSFELLHAPATVCGPKKSTNLVKNK

SEQ ID NO: 230 - DNA, 2028 bp, synthetic construct
  misc_feature 1..2028: note = Md_l1_Sh_l2_S2
  source 1..2028: mol_type = other DNA
gagggcgtagagtgcgacttctcccccttgctttccgggactccaccccaggtgtataattttaaaaggcttgtctttactaactgcaactacaacttgaccaaacttctgagtctgttttctgttaatgacttcacatgctctcaaatatcacctgccgctatcgctagtaactgttacagctctcttatcttggattatttctcttatcccctctctatgaaatctgatctcagtgtaagtagtgcaggacccatttcccagtttaattacaaacaatcattctcaaatccaacatgcttgatactggctactgtccctcataacctgaccacaatcactaaaccactcaagtattcatacatcaacaagtgttcccgcctcctgtcagacgatcgaacagaggtccctcagttggtaaacgctaatcaatattcaccatgcgtgagcattgtcccaagcaccgtctgggaagatggggattactataggaaacagttgtcacctcttgagggagggggctggttggtcgcatccggtagcacagtggctatgactgaacagctgcaaatgggtttcggcataaccgtgcagtatgggaccgatacaaactccgtgtgtccaaaatctgggggaggaagtggagggggtagtggtggaggaagtagggtagttccctcaggcgatgtagttagatttccaaacataaccaacttgtgccccttcggggaggtattcaacgccaccaagttccccagtgtatatgcctgggagcggaaaaagatttctaattgcgttgctgattatagcgtactgtacaatagtacatttttttcaaccttcaaatgctacggtgttagcgccactaagctcaatgacttgtgcttttcaaatgtgtacgctgacagctttgttgtaaaaggcgacgatgtccgacagatagcacctggacaaactggtgtgattgcagattacaattacaaattgcccgacgattttatggggtgtgtgctcgcatggaatacccggaacattgatgctacctcaacaggaaactataactacaagtatcgatacttgcgacacgggaaactgaggccatttgagcgtgacatatcaaatgtgccattttcccccgacggaaaaccatgtactcctcccgctctgaattgctactggcccctgaacgattacggattctatactactaccggcattggctatcaaccttacagggttgtagtccttagctttgagttgctcaacgctcctgcaaccgtatgtgggccaaagctctcaactgatctcatcaaaaatcagtgcgtcaattttaactttaatggcctgacaggtactggtgttcttactagcggcggatcagggggtagcggcggctccggtggctctaatatcactaatctttgccccttcggggaagtatttaacgctactcgatttgctagcgtatatgcctggaaccggaagagaataagcaactgtgttgcagactatagcgtgctttacaattccgcatcctttagtaccttcaaatgttacggtgtgagccccaccaaactcaatgatctctgtttcacaaacgtgtacgcagatagtttcgttatacgcggggacgaagtacggcagatagcccctggccagacaggaaagatagccgattacaactacaaacttccagacgattttacagggtgtgtgatcgcttggaattcaaataacctggactccaaagtgggaggcaactataattacctgtaccgactgttccgcaaaagcaacttgaaacctttcgagcgagatatatcaaccgaaatctaccaagctggttctacaccttgtaatggtgtggagggatttaactgctacttccctcttcagtcctatggatttcagcctacaaatggagtcgggtatcaaccctatagagtcgtggtgttgtcatttgaacttctccatgcacctgctactgtctgtggtccaaaaaagtccactaatcttgtaaaaaacaaa

SEQ ID NO: 231 - protein, 647 aa, synthetic construct
  REGION 1..647: note = Md_l1_Si_l2_S2
EGVECDFSPLLSGTPPQVYNFKRLVFTNCNYNLTKLLSLFSVNDFTCSQISPAAIASNCYSSLILDYFSYPLSMKSDLSVSSAGPISQFNYKQSFSNPTCLILATVPHNLTTITKPLKYSYINKCSRLLSDDRTEVPQLVNANQYSPCVSIVPSTVWEDGDYYRKQLSPLEGGGWLVASGSTVAMTEQLQMGFGITVQYGTDTNSVCPKSGGGSGGGSGGGSNITNLCPFGEVFNATKFPSVYAWERKKISNCVADYSVLYNSTFFSTFKCYGVSATKLNDLCFSNVYADSFVVKGDDVRQIAPGQTGVIADYNYKLPDDFMGCVLAWNTRNIDATSTGNYNYKYRYLRHGKLRPFERDISNVPFSPDGKPCTPPALNCYWPLNDYGFYTTTGIGYQPYRVVVLSFELLNAPATVCGPKLSTDLIKNSGGSGGSGGSGGSNITNLCPFGEVFNATRFASVYAWNRKRISNCVADYSVLYNSASFSTFKCYGVSPTKLNDLCFTNVYADSFVIRGDEVRQIAPGQTGKIADYNYKLPDDFTGCVIAWNSNNLDSKVGGNYNYLYRLFRKSNLKPFERDISTEIYQAGSTPCNGVEGFNCYFPLQSYGFQPTNGVGYQPYRVVVLSFELLHAPATVCGPKKSTNLVKNK

SEQ ID NO: 232 - DNA, 1941 bp, synthetic construct
  misc_feature 1..1941: note = Md_l1_Si_l2_S2
  source 1..1941: mol_type = other DNA
gagggcgtagagtgcgacttctcccccttgctttccgggactccaccccaggtgtataattttaaaaggcttgtctttactaactgcaactacaacttgaccaaacttctgagtctgttttctgttaatgacttcacatgctctcaaatatcacctgccgctatcgctagtaactgttacagctctcttatcttggattatttctcttatcccctctctatgaaatctgatctcagtgtaagtagtgcaggacccatttcccagtttaattacaaacaatcattctcaaatccaacatgcttgatactggctactgtccctcataacctgaccacaatcactaaaccactcaagtattcatacatcaacaagtgttcccgcctcctgtcagacgatcgaacagaggtccctcagttggtaaacgctaatcaatattcaccatgcgtgagcattgtcccaagcaccgtctgggaagatggggattactataggaaacagttgtcacctcttgagggagggggctggttggtcgcatccggtagcacagtggctatgactgaacagctgcaaatgggtttcggcataaccgtgcagtatgggaccgatacaaactccgtgtgtccaaaatctgggggaggaagtggagggggtagtggtggaggaagtaacataaccaacttgtgccccttcggggaggtattcaacgccaccaagttccccagtgtatatgcctgggagcggaaaaagatttctaattgcgttgctgattatagcgtactgtacaatagtacatttttttcaaccttcaaatgctacggtgttagcgccactaagctcaatgacttgtgcttttcaaatgtgtacgctgacagctttgttgtaaaaggcgacgatgtccgacagatagcacctggacaaactggtgtgattgcagattacaattacaaattgcccgacgattttatggggtgtgtgctcgcatggaatacccggaacattgatgctacctcaacaggaaactataactacaagtatcgatacttgcgacacgggaaactgaggccatttgagcgtgacatatcaaatgtgccattttcccccgacggaaaaccatgtactcctcccgctctgaattgctactggcccctgaacgattacggattctatactactaccggcattggctatcaaccttacagggttgtagtccttagctttgagttgctcaacgctcctgcaaccgtatgtgggccaaagctctcaactgatctcatcaaaaatagcggcggatcagggggtagcggcggctccggtggctctaatatcactaatctttgccccttcggggaagtatttaacgctactcgatttgctagcgtatatgcctggaaccggaagagaataagcaactgtgttgcagactatagcgtgctttacaattccgcatcctttagtaccttcaaatgttacggtgtgagccccaccaaactcaatgatctctgtttcacaaacgtgtacgcagatagtttcgttatacgcggggacgaagtacggcagatagcccctggccagacaggaaagatagccgattacaactacaaacttccagacgattttacagggtgtgtgatcgcttggaattcaaataacctggactccaaagtgggaggcaactataattacctgtaccgactgttccgcaaaagcaacttgaaacctttcgagcgagatatatcaaccgaaatctaccaagctggttctacaccttgtaatggtgtggagggatttaactgctacttccctcttcagtcctatggatttcagcctacaaatggagtcgggtatcaaccctatagagtcgtggtgttgtcatttgaacttctccatgcacctgctactgtctgtggtccaaaaaagtccactaatcttgtaaaaaacaaa

SEQ ID NO: 233 - protein, 686 aa, synthetic construct
  REGION 1..686: note = Me_l1_Sh_l2_S2
SGSVVEQAEGVECDFSPLLSGTPPQVYNFKRLVFTNCNYNLTKLLSLFSVNDFTCSQISPAAIASNCYSSLILDYFSYPLSMKSDLSVSSAGPISQFNYKQSFSNPTCLILATVPHNLTTITKPLKYSYINKCSRLLSDDRTEVPQLVNANQYSPCVSIVPSTVWEDGDYYRKQLSPLEGGGWLVASGSTVAMTEQLQMGFGITVQYGTDTNSVCPKLESGGGSGGGSGGGSRVVPSGDVVRFPNITNLCPFGEVFNATKFPSVYAWERKKISNCVADYSVLYNSTFFSTFKCYGVSATKLNDLCFSNVYADSFVVKGDDVRQIAPGQTGVIADYNYKLPDDFMGCVLAWNTRNIDATSTGNYNYKYRYLRHGKLRPFERDISNVPFSPDGKPCTPPALNCYWPLNDYGFYTTTGIGYQPYRVVVLSFELLNAPATVCGPKLSTDLIKNQCVNFNFNGLTGTGVLTSGGSGGSGGSGGSNITNLCPFGEVFNATRFASVYAWNRKRISNCVADYSVLYNSASFSTFKCYGVSPTKLNDLCFTNVYADSFVIRGDEVRQIAPGQTGKIADYNYKLPDDFTGCVIAWNSNNLDSKVGGNYNYLYRLFRKSNLKPFERDISTEIYQAGSTPCNGVEGFNCYFPLQSYGFQPTNGVGYQPYRVVVLSFELLHAPATVCGPKKSTNLVKNK

SEQ ID NO: 234 - DNA, 2058 bp, synthetic construct
  misc_feature 1..2058: note = Me_l1_Sh_l2_S2
  source 1..2058: mol_type = other DNA
tcagggtccgtagttgagcaggcagagggcgtagagtgcgacttctcccccttgctttccgggactccaccccaggtgtataattttaaaaggcttgtctttactaactgcaactacaacttgaccaaacttctgagtctgttttctgttaatgacttcacatgctctcaaatatcacctgccgctatcgctagtaactgttacagctctcttatcttggattatttctcttatcccctctctatgaaatctgatctcagtgtaagtagtgcaggacccatttcccagtttaattacaaacaatcattctcaaatccaacatgcttgatactggctactgtccctcataacctgaccacaatcactaaaccactcaagtattcatacatcaacaagtgttcccgcctcctgtcagacgatcgaacagaggtccctcagttggtaaacgctaatcaatattcaccatgcgtgagcattgtcccaagcaccgtctgggaagatggggattactataggaaacagttgtcacctcttgagggagggggctggttggtcgcatccggtagcacagtggctatgactgaacagctgcaaatgggtttcggcataaccgtgcagtatgggaccgatacaaactccgtgtgtccaaaattggaatctgggggaggaagtggagggggtagtggtggaggaagtagggtagttccctcaggcgatgtagttagatttccaaacataaccaacttgtgccccttcggggaggtattcaacgccaccaagttccccagtgtatatgcctgggagcggaaaaagatttctaattgcgttgctgattatagcgtactgtacaatagtacatttttttcaaccttcaaatgctacggtgttagcgccactaagctcaatgacttgtgcttttcaaatgtgtacgctgacagctttgttgtaaaaggcgacgatgtccgacagatagcacctggacaaactggtgtgattgcagattacaattacaaattgcccgacgattttatggggtgtgtgctcgcatggaatacccggaacattgatgctacctcaacaggaaactataactacaagtatcgatacttgcgacacgggaaactgaggccatttgagcgtgacatatcaaatgtgccattttcccccgacggaaaaccatgtactcctcccgctctgaattgctactggcccctgaacgattacggattctatactactaccggcattggctatcaaccttacagggttgtagtccttagctttgagttgctcaacgctcctgcaaccgtatgtgggccaaagctctcaactgatctcatcaaaaatcagtgcgtcaattttaactttaatggcctgacaggtactggtgttcttactagcggcggatcagggggtagcggcggctccggtggctctaatatcactaatctttgccccttcggggaagtatttaacgctactcgatttgctagcgtatatgcctggaaccggaagagaataagcaactgtgttgcagactatagcgtgctttacaattccgcatcctttagtaccttcaaatgttacggtgtgagccccaccaaactcaatgatctctgtttcacaaacgtgtacgcagatagtttcgttatacgcggggacgaagtacggcagatagcccctggccagacaggaaagatagccgattacaactacaaacttccagacgattttacagggtgtgtgatcgcttggaattcaaataacctggactccaaagtgggaggcaactataattacctgtaccgactgttccgcaaaagcaacttgaaacctttcgagcgagatatatcaaccgaaatctaccaagctggttctacaccttgtaatggtgtggagggatttaactgctacttccctcttcagtcctatggatttcagcctacaaatggagtcgggtatcaaccctatagagtcgtggtgttgtcatttgaacttctccatgcacctgctactgtctgtggtccaaaaaagtccactaatcttgtaaaaaacaaa

SEQ ID NO: 235 - protein, 657 aa, synthetic construct
  REGION 1..657: note = Me_l1_Si_l2_S2
SGSVVEQAEGVECDFSPLLSGTPPQVYNFKRLVFTNCNYNLTKLLSLFSVNDFTCSQISPAAIASNCYSSLILDYFSYPLSMKSDLSVSSAGPISQFNYKQSFSNPTCLILATVPHNLTTITKPLKYSYINKCSRLLSDDRTEVPQLVNANQYSPCVSIVPSTVWEDGDYYRKQLSPLEGGGWLVASGSTVAMTEQLQMGFGITVQYGTDTNSVCPKLESGGGSGGGSGGGSNITNLCPFGEVFNATKFPSVYAWERKKISNCVADYSVLYNSTFFSTFKCYGVSATKLNDLCFSNVYADSFVVKGDDVRQIAPGQTGVIADYNYKLPDDFMGCVLAWNTRNIDATSTGNYNYKYRYLRHGKLRPFERDISNVPFSPDGKPCTPPALNCYWPLNDYGFYTTTGIGYQPYRVVVLSFELLNAPATVCGPKLSTDLIKNSGGSGGSGGSGGSNITNLCPFGEVFNATRFASVYAWNRKRISNCVADYSVLYNSASFSTFKCYGVSPTKLNDLCFTNVYADSFVIRGDEVRQIAPGQTGKIADYNYKLPDDFTGCVIAWNSNNLDSKVGGNYNYLYRLFRKSNLKPFERDISTEIYQAGSTPCNGVEGFNCYFPLQSYGFQPTNGVGYQPYRVVVLSFELLHAPATVCGPKKSTNLVKNK

SEQ ID NO: 236 - DNA, 1971 bp, synthetic construct
  misc_feature 1..1971: note = Me_l1_Si_l2_S2
  source 1..1971: mol_type = other DNA
tcagggtccgtagttgagcaggcagagggcgtagagtgcgacttctcccccttgctttccgggactccaccccaggtgtataattttaaaaggcttgtctttactaactgcaactacaacttgaccaaacttctgagtctgttttctgttaatgacttcacatgctctcaaatatcacctgccgctatcgctagtaactgttacagctctcttatcttggattatttctcttatcccctctctatgaaatctgatctcagtgtaagtagtgcaggacccatttcccagtttaattacaaacaatcattctcaaatccaacatgcttgatactggctactgtccctcataacctgaccacaatcactaaaccactcaagtattcatacatcaacaagtgttcccgcctcctgtcagacgatcgaacagaggtccctcagttggtaaacgctaatcaatattcaccatgcgtgagcattgtcccaagcaccgtctgggaagatggggattactataggaaacagttgtcacctcttgagggagggggctggttggtcgcatccggtagcacagtggctatgactgaacagctgcaaatgggtttcggcataaccgtgcagtatgggaccgatacaaactccgtgtgtccaaaattggaatctgggggaggaagtggagggggtagtggtggaggaagtaacataaccaacttgtgccccttcggggaggtattcaacgccaccaagttccccagtgtatatgcctgggagcggaaaaagatttctaattgcgttgctgattatagcgtactgtacaatagtacatttttttcaaccttcaaatgctacggtgttagcgccactaagctcaatgacttgtgcttttcaaatgtgtacgctgacagctttgttgtaaaaggcgacgatgtccgacagatagcacctggacaaactggtgtgattgcagattacaattacaaattgcccgacgattttatggggtgtgtgctcgcatggaatacccggaacattgatgctacctcaacaggaaactataactacaagtatcgatacttgcgacacgggaaactgaggccatttgagcgtgacatatcaaatgtgccattttcccccgacggaaaaccatgtactcctcccgctctgaattgctactggcccctgaacgattacggattctatactactaccggcattggctatcaaccttacagggttgtagtccttagctttgagttgctcaacgctcctgcaaccgtatgtgggccaaagctctcaactgatctcatcaaaaatagcggcggatcagggggtagcggcggctccggtggctctaatatcactaatctttgccccttcggggaagtatttaacgctactcgatttgctagcgtatatgcctggaaccggaagagaataagcaactgtgttgcagactatagcgtgctttacaattccgcatcctttagtaccttcaaatgttacggtgtgagccccaccaaactcaatgatctctgtttcacaaacgtgtacgcagatagtttcgttatacgcggggacgaagtacggcagatagcccctggccagacaggaaagatagccgattacaactacaaacttccagacgattttacagggtgtgtgatcgcttggaattcaaataacctggactccaaagtgggaggcaactataattacctgtaccgactgttccgcaaaagcaacttgaaacctttcgagcgagatatatcaaccgaaatctaccaagctggttctacaccttgtaatggtgtggagggatttaactgctacttccctcttcagtcctatggatttcagcctacaaatggagtcgggtatcaaccctatagagtcgtggtgttgtcatttgaacttctccatgcacctgctactgtctgtggtccaaaaaagtccactaatcttgtaaaaaacaaa

SEQ ID NO: 237 - protein, 687 aa, synthetic construct
  REGION 1..687: note = Mf_l1_Sh_l2_S2
EQAEGVECDFSPLLSGTPPQVYNFKRLVFTNCNYNLTKLLSLFSVNDFTCSQISPAAIASNCYSSLILDYFSYPLSMKSDLSVSSAGPISQFNYKQSFSNPTCLILATVPHNLTTITKPLKYSYINKCSRLLSDDRTEVPQLVNANQYSPCVSIVPSTVWEDGDYYRKQLSPLEGGGWLVASGSTVAMTEQLQMGFGITVQYGTDTNSVCPKLEFANDTKSGGGSGGGSGGGSRVVPSGDVVRFPNITNLCPFGEVFNATKFPSVYAWERKKISNCVADYSVLYNSTFFSTFKCYGVSATKLNDLCFSNVYADSFVVKGDDVRQIAPGQTGVIADYNYKLPDDFMGCVLAWNTRNIDATSTGNYNYKYRYLRHGKLRPFERDISNVPFSPDGKPCTPPALNCYWPLNDYGFYTTTGIGYQPYRVVVLSFELLNAPATVCGPKLSTDLIKNQCVNFNFNGLTGTGVLTSGGSGGSGGSGGSNITNLCPFGEVFNATRFASVYAWNRKRISNCVADYSVLYNSASFSTFKCYGVSPTKLNDLCFTNVYADSFVIRGDEVRQIAPGQTGKIADYNYKLPDDFTGCVIAWNSNNLDSKVGGNYNYLYRLFRKSNLKPFERDISTEIYQAGSTPCNGVEGFNCYFPLQSYGFQPTNGVGYQPYRVVVLSFELLHAPATVCGPKKSTNLVKNK

SEQ ID NO: 238 - DNA, 2061 bp, synthetic construct
  misc_feature 1..2061: note = Mf_l1_Sh_l2_S2
  source 1..2061: mol_type = other DNA
gagcaggcagagggcgtagagtgcgacttctcccccttgctttccgggactccaccccaggtgtataattttaaaaggcttgtctttactaactgcaactacaacttgaccaaacttctgagtctgttttctgttaatgacttcacatgctctcaaatatcacctgccgctatcgctagtaactgttacagctctcttatcttggattatttctcttatcccctctctatgaaatctgatctcagtgtaagtagtgcaggacccatttcccagtttaattacaaacaatcattctcaaatccaacatgcttgatactggctactgtccctcataacctgaccacaatcactaaaccactcaagtattcatacatcaacaagtgttcccgcctcctgtcagacgatcgaacagaggtccctcagttggtaaacgctaatcaatattcaccatgcgtgagcattgtcccaagcaccgtctgggaagatggggattactataggaaacagttgtcacctcttgagggagggggctggttggtcgcatccggtagcacagtggctatgactgaacagctgcaaatgggtttcggcataaccgtgcagtatgggaccgatacaaactccgtgtgtccaaaattggaatttgctaacgacacaaaatctgggggaggaagtggagggggtagtggtggaggaagtagggtagttccctcaggcgatgtagttagatttccaaacataaccaacttgtgccccttcggggaggtattcaacgccaccaagttccccagtgtatatgcctgggagcggaaaaagatttctaattgcgttgctgattatagcgtactgtacaatagtacatttttttcaaccttcaaatgctacggtgttagcgccactaagctcaatgacttgtgcttttcaaatgtgtacgctgacagctttgttgtaaaaggcgacgatgtccgacagatagcacctggacaaactggtgtgattgcagattacaattacaaattgcccgacgattttatggggtgtgtgctcgcatggaatacccggaacattgatgctacctcaacaggaaactataactacaagtatcgatacttgcgacacgggaaactgaggccatttgagcgtgacatatcaaatgtgccattttcccccgacggaaaaccatgtactcctcccgctctgaattgctactggcccctgaacgattacggattctatactactaccggcattggctatcaaccttacagggttgtagtccttagctttgagttgctcaacgctcctgcaaccgtatgtgggccaaagctctcaactgatctcatcaaaaatcagtgcgtcaattttaactttaatggcctgacaggtactggtgttcttactagcggcggatcagggggtagcggcggctccggtggctctaatatcactaatctttgccccttcggggaagtatttaacgctactcgatttgctagcgtatatgcctggaaccggaagagaataagcaactgtgttgcagactatagcgtgctttacaattccgcatcctttagtaccttcaaatgttacggtgtgagccccaccaaactcaatgatctctgtttcacaaacgtgtacgcagatagtttcgttatacgcggggacgaagtacggcagatagcccctggccagacaggaaagatagccgattacaactacaaacttccagacgattttacagggtgtgtgatcgcttggaattcaaataacctggactccaaagtgggaggcaactataattacctgtaccgactgttccgcaaaagcaacttgaaacctttcgagcgagatatatcaaccgaaatctaccaagctggttctacaccttgtaatggtgtggagggatttaactgctacttccctcttcagtcctatggatttcagcctacaaatggagtcgggtatcaaccctatagagtcgtggtgttgtcatttgaacttctccatgcacctgctactgtctgtggtccaaaaaagtccactaatcttgtaaaaaacaaa

SEQ ID NO: 239 - protein, 658 aa, synthetic construct
  REGION 1..658: note = Mf_l1_Si_l2_S2
EQAEGVECDFSPLLSGTPPQVYNFKRLVFTNCNYNLTKLLSLFSVNDFTCSQISPAAIASNCYSSLILDYFSYPLSMKSDLSVSSAGPISQFNYKQSFSNPTCLILATVPHNLTTITKPLKYSYINKCSRLLSDDRTEVPQLVNANQYSPCVSIVPSTVWEDGDYYRKQLSPLEGGGWLVASGSTVAMTEQLQMGFGITVQYGTDTNSVCPKLEFANDTKSGGGSGGGSGGGSNITNLCPFGEVFNATKFPSVYAWERKKISNCVADYSVLYNSTFFSTFKCYGVSATKLNDLCFSNVYADSFVVKGDDVRQIAPGQTGVIADYNYKLPDDFMGCVLAWNTRNIDATSTGNYNYKYRYLRHGKLRPFERDISNVPFSPDGKPCTPPALNCYWPLNDYGFYTTTGIGYQPYRVVVLSFELLNAPATVCGPKLSTDLIKNSGGSGGSGGSGGSNITNLCPFGEVFNATRFASVYAWNRKRISNCVADYSVLYNSASFSTFKCYGVSPTKLNDLCFTNVYADSFVIRGDEVRQIAPGQTGKIADYNYKLPDDFTGCVIAWNSNNLDSKVGGNYNYLYRLFRKSNLKPFERDISTEIYQAGSTPCNGVEGFNCYFPLQSYGFQPTNGVGYQPYRVVVLSFELLHAPATVCGPKKSTNLVKNK

SEQ ID NO: 240 - DNA, 1974 bp, synthetic construct
  misc_feature 1..1974: note = Mf_l1_Si_l2_S2
  source 1..1974: mol_type = other DNA
gagcaggcagagggcgtagagtgcgacttctcccccttgctttccgggactccaccccaggtgtataattttaaaaggcttgtctttactaactgcaactacaacttgaccaaacttctgagtctgttttctgttaatgacttcacatgctctcaaatatcacctgccgctatcgctagtaactgttacagctctcttatcttggattatttctcttatcccctctctatgaaatctgatctcagtgtaagtagtgcaggacccatttcccagtttaattacaaacaatcattctcaaatccaacatgcttgatactggctactgtccctcataacctgaccacaatcactaaaccactcaagtattcatacatcaacaagtgttcccgcctcctgtcagacgatcgaacagaggtccctcagttggtaaacgctaatcaatattcaccatgcgtgagcattgtcccaagcaccgtctgggaagatggggattactataggaaacagttgtcacctcttgagggagggggctggttggtcgcatccggtagcacagtggctatgactgaacagctgcaaatgggtttcggcataaccgtgcagtatgggaccgatacaaactccgtgtgtccaaaattggaatttgctaacgacacaaaatctgggggaggaagtggagggggtagtggtggaggaagtaacataaccaacttgtgccccttcggggaggtattcaacgccaccaagttccccagtgtatatgcctgggagcggaaaaagatttctaattgcgttgctgattatagcgtactgtacaatagtacatttttttcaaccttcaaatgctacggtgttagcgccactaagctcaatgacttgtgcttttcaaatgtgtacgctgacagctttgttgtaaaaggcgacgatgtccgacagatagcacctggacaaactggtgtgattgcagattacaattacaaattgcccgacgattttatggggtgtgtgctcgcatggaatacccggaacattgatgctacctcaacaggaaactataactacaagtatcgatacttgcgacacgggaaactgaggccatttgagcgtgacatatcaaatgtgccattttcccccgacggaaaaccatgtactcctcccgctctgaattgctactggcccctgaacgattacggattctatactactaccggcattggctatcaaccttacagggttgtagtccttagctttgagttgctcaacgctcctgcaaccgtatgtgggccaaagctctcaactgatctcatcaaaaatagcggcggatcagggggtagcggcggctccggtggctctaatatcactaatctttgccccttcggggaagtatttaacgctactcgatttgctagcgtatatgcctggaaccggaagagaataagcaactgtgttgcagactatagcgtgctttacaattccgcatcctttagtaccttcaaatgttacggtgtgagccccaccaaactcaatgatctctgtttcacaaacgtgtacgcagatagtttcgttatacgcggggacgaagtacggcagatagcccctggccagacaggaaagatagccgattacaactacaaacttccagacgattttacagggtgtgtgatcgcttggaattcaaataacctggactccaaagtgggaggcaactataattacctgtaccgactgttccgcaaaagcaacttgaaacctttcgagcgagatatatcaaccgaaatctaccaagctggttctacaccttgtaatggtgtggagggatttaactgctacttccctcttcagtcctatggatttcagcctacaaatggagtcgggtatcaaccctatagagtcgtggtgttgtcatttgaacttctccatgcacctgctactgtctgtggtccaaaaaagtccactaatcttgtaaaaaacaaa

SEQ ID NO: 241 - protein, 684 aa, synthetic construct
  REGION 1..684: note = Mg_l1_Sh_l2_S2
EGVECDFSPLLSGTPPQVYNFKRLVFTNCNYNLTKLLSLFSVNDFTCSQISPAAIASNCYSSLILDYFSYPLSMKSDLSVSSAGPISQFNYKQSFSNPTCLILATVPHNLTTITKPLKYSYINKCSRLLSDDRTEVPQLVNANQYSPCVSIVPSTVWEDGDYYRKQLSPLEGGGWLVASGSTVAMTEQLQMGFGITVQYGTDTNSVCPKLEFANDTKSGGGSGGGSGGGSRVVPSGDVVRFPNITNLCPFGEVFNATKFPSVYAWERKKISNCVADYSVLYNSTFFSTFKCYGVSATKLNDLCFSNVYADSFVVKGDDVRQIAPGQTGVIADYNYKLPDDFMGCVLAWNTRNIDATSTGNYNYKYRYLRHGKLRPFERDISNVPFSPDGKPCTPPALNCYWPLNDYGFYTTTGIGYQPYRVVVLSFELLNAPATVCGPKLSTDLIKNQCVNFNFNGLTGTGVLTSGGSGGSGGSGGSNITNLCPFGEVFNATRFASVYAWNRKRISNCVADYSVLYNSASFSTFKCYGVSPTKLNDLCFTNVYADSFVIRGDEVRQIAPGQTGKIADYNYKLPDDFTGCVIAWNSNNLDSKVGGNYNYLYRLFRKSNLKPFERDISTEIYQAGSTPCNGVEGFNCYFPLQSYGFQPTNGVGYQPYRVVVLSFELLHAPATVCGPKKSTNLVKNK

SEQ ID NO: 242 - DNA, 2052 bp, synthetic construct
  misc_feature 1..2052: note = Mg_l1_Sh_l2_S2
  source 1..2052: mol_type = other DNA
gagggcgtagagtgcgacttctcccccttgctttccgggactccaccccaggtgtataattttaaaaggcttgtctttactaactgcaactacaacttgaccaaacttctgagtctgttttctgttaatgacttcacatgctctcaaatatcacctgccgctatcgctagtaactgttacagctctcttatcttggattatttctcttatcccctctctatgaaatctgatctcagtgtaagtagtgcaggacccatttcccagtttaattacaaacaatcattctcaaatccaacatgcttgatactggctactgtccctcataacctgaccacaatcactaaaccactcaagtattcatacatcaacaagtgttcccgcctcctgtcagacgatcgaacagaggtccctcagttggtaaacgctaatcaatattcaccatgcgtgagcattgtcccaagcaccgtctgggaagatggggattactataggaaacagttgtcacctcttgagggagggggctggttggtcgcatccggtagcacagtggctatgactgaacagctgcaaatgggtttcggcataaccgtgcagtatgggaccgatacaaactccgtgtgtccaaaattggaatttgctaacgacacaaaatctgggggaggaagtggagggggtagtggtggaggaagtagggtagttccctcaggcgatgtagttagatttccaaacataaccaacttgtgccccttcggggaggtattcaacgccaccaagttccccagtgtatatgcctgggagcggaaaaagatttctaattgcgttgctgattatagcgtactgtacaatagtacatttttttcaaccttcaaatgctacggtgttagcgccactaagctcaatgacttgtgcttttcaaatgtgtacgctgacagctttgttgtaaaaggcgacgatgtccgacagatagcacctggacaaactggtgtgattgcagattacaattacaaattgcccgacgattttatggggtgtgtgctcgcatggaatacccggaacattgatgctacctcaacaggaaactataactacaagtatcgatacttgcgacacgggaaactgaggccatttgagcgtgacatatcaaatgtgccattttcccccgacggaaaaccatgtactcctcccgctctgaattgctactggcccctgaacgattacggattctatactactaccggcattggctatcaaccttacagggttgtagtccttagctttgagttgctcaacgctcctgcaaccgtatgtgggccaaagctctcaactgatctcatcaaaaatcagtgcgtcaattttaactttaatggcctgacaggtactggtgttcttactagcggcggatcagggggtagcggcggctccggtggctctaatatcactaatctttgccccttcggggaagtatttaacgctactcgatttgctagcgtatatgcctggaaccggaagagaataagcaactgtgttgcagactatagcgtgctttacaattccgcatcctttagtaccttcaaatgttacggtgtgagccccaccaaactcaatgatctctgtttcacaaacgtgtacgcagatagtttcgttatacgcggggacgaagtacggcagatagcccctggccagacaggaaagatagccgattacaactacaaacttccagacgattttacagggtgtgtgatcgcttggaattcaaataacctggactccaaagtgggaggcaactataattacctgtaccgactgttccgcaaaagcaacttgaaacctttcgagcgagatatatcaaccgaaatctaccaagctggttctacaccttgtaatggtgtggagggatttaactgctacttccctcttcagtcctatggatttcagcctacaaatggagtcgggtatcaaccctatagagtcgtggtgttgtcatttgaacttctccatgcacctgctactgtctgtggtccaaaaaagtccactaatcttgtaaaaaacaaa

SEQ ID NO: 243 - protein, 655 aa, synthetic construct
  REGION 1..655: note = Mg_l1_Si_l2_S2
EGVECDFSPLLSGTPPQVYNFKRLVFTNCNYNLTKLLSLFSVNDFTCSQISPAAIASNCYSSLILDYFSYPLSMKSDLSVSSAGPISQFNYKQSFSNPTCLILATVPHNLTTITKPLKYSYINKCSRLLSDDRTEVPQLVNANQYSPCVSIVPSTVWEDGDYYRKQLSPLEGGGWLVASGSTVAMTEQLQMGFGITVQYGTDTNSVCPKLEFANDTKSGGGSGGGSGGGSNITNLCPFGEVFNATKFPSVYAWERKKISNCVADYSVLYNSTFFSTFKCYGVSATKLNDLCFSNVYADSFVVKGDDVRQIAPGQTGVIADYNYKLPDDFMGCVLAWNTRNIDATSTGNYNYKYRYLRHGKLRPFERDISNVPFSPDGKPCTPPALNCYWPLNDYGFYTTTGIGYQPYRVVVLSFELLNAPATVCGPKLSTDLIKNSGGSGGSGGSGGSNITNLCPFGEVFNATRFASVYAWNRKRISNCVADYSVLYNSASFSTFKCYGVSPTKLNDLCFTNVYADSFVIRGDEVRQIAPGQTGKIADYNYKLPDDFTGCVIAWNSNNLDSKVGGNYNYLYRLFRKSNLKPFERDISTEIYQAGSTPCNGVEGFNCYFPLQSYGFQPTNGVGYQPYRVVVLSFELLHAPATVCGPKKSTNLVKNK

SEQ ID NO: 244 - DNA, 1965 bp, synthetic construct
  misc_feature 1..1965: note = Mg_l1_Si_l2_S2
  source 1..1965: mol_type = other DNA
gagggcgtagagtgcgacttctcccccttgctttccgggactccaccccaggtgtataattttaaaaggcttgtctttactaactgcaactacaacttgaccaaacttctgagtctgttttctgttaatgacttcacatgctctcaaatatcacctgccgctatcgctagtaactgttacagctctcttatcttggattatttctcttatcccctctctatgaaatctgatctcagtgtaagtagtgcaggacccatttcccagtttaattacaaacaatcattctcaaatccaacatgcttgatactggctactgtccctcataacctgaccacaatcactaaaccactcaagtattcatacatcaacaagtgttcccgcctcctgtcagacgatcgaacagaggtccctcagttggtaaacgctaatcaatattcaccatgcgtgagcattgtcccaagcaccgtctgggaagatggggattactataggaaacagttgtcacctcttgagggagggggctggttggtcgcatccggtagcacagtggctatgactgaacagctgcaaatgggtttcggcataaccgtgcagtatgggaccgatacaaactccgtgtgtccaaaattggaatttgctaacgacacaaaatctgggggaggaagtggagggggtagtggtggaggaagtaacataaccaacttgtgccccttcggggaggtattcaacgccaccaagttccccagtgtatatgcctgggagcggaaaaagatttctaattgcgttgctgattatagcgtactgtacaatagtacatttttttcaaccttcaaatgctacggtgttagcgccactaagctcaatgacttgtgcttttcaaatgtgtacgctgacagctttgttgtaaaaggcgacgatgtccgacagatagcacctggacaaactggtgtgattgcagattacaattacaaattgcccgacgattttatggggtgtgtgctcgcatggaatacccggaacattgatgctacctcaacaggaaactataactacaagtatcgatacttgcgacacgggaaactgaggccatttgagcgtgacatatcaaatgtgccattttcccccgacggaaaaccatgtactcctcccgctctgaattgctactggcccctgaacgattacggattctatactactaccggcattggctatcaaccttacagggttgtagtccttagctttgagttgctcaacgctcctgcaaccgtatgtgggccaaagctctcaactgatctcatcaaaaatagcggcggatcagggggtagcggcggctccggtggctctaatatcactaatctttgccccttcggggaagtatttaacgctactcgatttgctagcgtatatgcctggaaccggaagagaataagcaactgtgttgcagactatagcgtgctttacaattccgcatcctttagtaccttcaaatgttacggtgtgagccccaccaaactcaatgatctctgtttcacaaacgtgtacgcagatagtttcgttatacgcggggacgaagtacggcagatagcccctggccagacaggaaagatagccgattacaactacaaacttccagacgattttacagggtgtgtgatcgcttggaattcaaataacctggactccaaagtgggaggcaactataattacctgtaccgactgttccgcaaaagcaacttgaaacctttcgagcgagatatatcaaccgaaatctaccaagctggttctacaccttgtaatggtgtggagggatttaactgctacttccctcttcagtcctatggatttcagcctacaaatggagtcgggtatcaaccctatagagtcgtggtgttgtcatttgaacttctccatgcacctgctactgtctgtggtccaaaaaagtccactaatcttgtaaaaaacaaa

SEQ ID NO: 245 - protein, 486 aa, synthetic construct
  REGION 1..486: note = Synthetic
RVQPTESIVRFPNITNLCPFGEVFNATRFASVYAWNRKRISNCVADYSVLYNSASFSTFKCYGVSPTKLNDLCFTNVYADSFVIRGDEVRQIAPGQTGKIADYNYKLPDDFTGCVIAWNSNNLDSKVGGNYNYLYRLFRKSNLKPFERDISTEIYQAGSTPCNGVEGFNCYFPLQSYGFQPTNGVGYQPYRVVVLSFELLHAPATVCGPKKSTNLVKNKCVNFNFNGLTGTGVLTESGSGGGGSGGGGSRVQPTESIVRFPNITNLCPFGEVFNATRFASVYAWNRKRISNCVADYSVLYNSASFSTFKCYGVSPTKLNDLCFTNVYADSFVIRGDEVRQIAPGQTGKIADYNYKLPDDFTGCVIAWNSNNLDSKVGGNYNYLYRLFRKSNLKPFERDISTEIYQAGSTPCNGVEGFNCYFPLQSYGFQPTNGVGYQPYRVVVLSFELLHAPATVCGPKKSTNLVKNKCVNFNFNGLTGTGVLTES

SEQ ID NO: 246 - DNA, 1458 bp, synthetic construct
  misc_feature 1..1458: note = Synthetic
  source 1..1458: mol_type = other DNA
agggtacaaccaactgaaagtatagtccgattccccaatattactaacctttgccctttcggtgaggtattcaatgccacccgtttcgcctccgtctacgcatggaacaggaaaagaatatcaaactgcgtagctgactacagcgtcctttataatagcgcatctttctcaactttcaaatgctatggggtgagcccaactaaacttaacgatctgtgttttaccaatgtatacgctgactcatttgttattagaggcgatgaagttagacaaattgctcctggccagacaggcaagattgcagattataattataaactgccagatgattttactgggtgcgttatagcctggaattccaacaacctggatagtaaagtcggcgggaattataattatctttacaggctgtttcgcaagtctaacctgaagccttttgaaagggatatttctacagagatctatcaagctggctctaccccttgtaacggggttgaaggatttaattgctatttcccactccagtcatacggttttcagccaactaacggcgtaggataccagccctatcgggtggttgtcctgtccttcgagctcttgcacgccccagcaactgtatgtggtcccaaaaagagcaccaacttggtcaaaaataaatgcgtcaattttaatttcaatggtctcaccggtactggggttctgacagaatccggatctggtggggggggcagcggagggggcggaagtcgagttcagccaaccgagagcattgtacgcttccccaacattaccaatctttgtccatttggtgaggtgtttaatgctactcgattcgctagcgtctacgcttggaaccgcaaaaggatatctaactgcgtagccgattactctgtattgtacaattctgcatcatttagcacttttaaatgttatggagtgtcaccaactaaacttaacgacctttgcttcacaaatgtttacgctgattcttttgttattcggggtgacgaggttcggcaaatagccccaggacagactggcaaaatcgccgattacaattacaaactccccgacgactttaccggctgcgtcatagcctggaactctaacaacctggatagcaaagtaggagggaactataattacctctatcgcttgtttcgcaaatccaacctgaagccctttgaacgtgacatttccaccgagatatatcaagctggctccacaccttgtaacggagtagaggggtttaactgttacttccccttgcaatcctacggttttcaacccactaacggcgtaggataccaaccttatagagtcgttgtgctttcctttgaactccttcatgcaccagctacagtgtgtggaccaaagaaaagcacaaacctcgttaaaaacaaatgcgtaaatttcaactttaatgggctgactggaacaggggtcttgactgagtct

SEQ ID NO: 247 - protein, 726 aa, synthetic construct
  REGION 1..726: note = Synthetic
RVQPTESIVRFPNITNLCPFGEVFNATRFASVYAWNRKRISNCVADYSVLYNSASFSTFKCYGVSPTKLNDLCFTNVYADSFVIRGDEVRQIAPGQTGKIADYNYKLPDDFTGCVIAWNSNNLDSKVGGNYNYLYRLFRKSNLKPFERDISTEIYQAGSTPCNGVEGFNCYFPLQSYGFQPTNGVGYQPYRVVVLSFELLHAPATVCGPKKSTNLVKNKCVNFNFNGLTGTGVLTESGSGGGGSGGGGSRVQPTESIVRFPNITNLCPFGEVFNATRFASVYAWNRKRISNCVADYSVLYNSASFSTFKCYGVSPTKLNDLCFTNVYADSFVIRGDEVRQIAPGQTGKIADYNYKLPDDFTGCVIAWNSNNLDSKVGGNYNYLYRLFRKSNLKPFERDISTEIYQAGSTPCNGVEGFNCYFPLQSYGFQPTNGVGYQPYRVVVLSFELLHAPATVCGPKKSTNLVKNKCVNFNFNGLTGTGVLTESGSGGGGDGGGGSGDKTHTCPPCPAPELLGGPSVFLFPPKPKDTLMISRTPEVTCVVVDVSHEDPEVKFNWYVDGVEVHNAKTKPREEQYNSTYRVVSVLTVLHQDWLNGKEYKCKVSNKALPAPIEKTISKAKGQPREPQVYTLPPSREELTKNQVSLTCLVKGFYPSDIAVEWESNGQPENNYKTTPPVLDSDGSFFLYSKLTVDKSRWQQGNVFSCSVMHEALHNHYTQKSLSLSPGS

SEQ ID NO: 248 - DNA, 2178 bp, synthetic construct
  misc_feature 1..2178: note = Synthetic
  source 1..2178: mol_type = other DNA
agggtacaaccaactgaaagtatagtccgattccccaatattactaacctttgccctttcggtgaggtattcaatgccacccgtttcgcctccgtctacgcatggaacaggaaaagaatatcaaactgcgtagctgactacagcgtcctttataatagcgcatctttctcaactttcaaatgctatggggtgagcccaactaaacttaacgatctgtgttttaccaatgtatacgctgactcatttgttattagaggcgatgaagttagacaaattgctcctggccagacaggcaagattgcagattataattataaactgccagatgattttactgggtgcgttatagcctggaattccaacaacctggatagtaaagtcggcgggaattataattatctttacaggctgtttcgcaagtctaacctgaagccttttgaaagggatatttctacagagatctatcaagctggctctaccccttgtaacggggttgaaggatttaattgctatttcccactccagtcatacggttttcagccaactaacggcgtaggataccagccctatcgggtggttgtcctgtccttcgagctcttgcacgccccagcaactgtatgtggtcccaaaaagagcaccaacttggtcaaaaataaatgcgtcaattttaatttcaatggtctcaccggtactggggttctgacagaatccggatctggtggggggggcagcggagggggcggaagtcgagttcagccaaccgagagcattgtacgcttccccaacattaccaatctttgtccatttggtgaggtgtttaatgctactcgattcgctagcgtctacgcttggaaccgcaaaaggatatctaactgcgtagccgattactctgtattgtacaattctgcatcatttagcacttttaaatgttatggagtgtcaccaactaaacttaacgacctttgcttcacaaatgtttacgctgattcttttgttattcggggtgacgaggttcggcaaatagccccaggacagactggcaaaatcgccgattacaattacaaactccccgacgactttaccggctgcgtcatagcctggaactctaacaacctggatagcaaagtaggagggaactataattacctctatcgcttgtttcgcaaatccaacctgaagccctttgaacgtgacatttccaccgagatatatcaagctggctccacaccttgtaacggagtagaggggtttaactgttacttccccttgcaatcctacggttttcaacccactaacggcgtaggataccaaccttatagagtcgttgtgctttcctttgaactccttcatgcaccagctacagtgtgtggaccaaagaaaagcacaaacctcgttaaaaacaaatgcgtaaatttcaactttaatgggctgactggaacaggggtcttgactgagtctggatccggcggcggcggtgacggtggtggcggctccggagacaagacccacacctgccccccttgtcctgcccctgagctgctgggcggaccctccgtgtttctgttcccccccaagcccaaggacaccctgatgatcagccggacccccgaggtcacctgcgtggtggtggacgtcagccacgaggacccagaggtcaagttcaattggtatgtggacggcgtggaggtgcacaacgccaagaccaagccccgggaggaacagtacaacagcacctaccgggtggtgtccgtgctgaccgtgctgcaccaggactggctgaacggcaaagaatacaagtgcaaggtgtccaacaaggccctgcctgcccccatcgagaaaaccatcagcaaggccaagggccagcccagagaaccccaggtgtacaccctgccccctagcagggaagagctgaccaagaaccaggtgtccctgacctgtctggtcaagggcttctaccccagcgatatcgccgtggagtgggagagcaacggccagcctgagaacaactacaagaccaccccccctgtgctggacagcgacggcagcttcttcctgtacagcaagctgaccgtggacaagagccggtggcagcagggcaacgtgtttagctgcagcgtgatgcacgaggccctgcacaaccactacacccagaagagcttaagcctgtcccctggcagt

SEQ ID NO: 249 - protein, 207 aa, synthetic construct
  REGION 1..207: note = Synthetic
NITNLCPFGEVFNATRFASVYAWNRKRISNCVADYSVLYNSASFSTFKCYGVSPTKLNDLCFTNVYADSFVIRGDEVRQIAPGQTGTIADYNYKLPDDFTGCVIAWNSNNLDSKVGGNYNYRYRLFRKSNLKPFERDISTEIYQAGSTPCNGVKGFNCYFPLQSYGFQPTYGVGYQPYRVVVLSFELLHAPATVCGPKKSTNLVKNK

SEQ ID NO: 250 - DNA, 621 bp, synthetic construct
  misc_feature 1..621: note = Synthetic
  source 1..621: mol_type = other DNA
aatatcactaatctttgccccttcggggaagtatttaacgctactcgatttgctagcgtatatgcctggaaccggaagagaataagcaactgtgttgcagactatagcgtgctttacaattccgcatcctttagtaccttcaaatgttacggtgtgagccccaccaaactcaatgatctctgtttcacaaacgtgtacgcagatagtttcgttatacgcggggacgaagtacggcagatagcccctggccagacaggaaccatagccgattacaactacaaacttccagacgattttacagggtgtgtgatcgcttggaattcaaataacctggactccaaagtgggaggcaactataattacagataccgactgttccgcaaaagcaacttgaaacctttcgagcgagatatatcaaccgaaatctaccaagctggttctacaccttgtaatggtgtgaagggatttaactgctacttccctcttcagtcctatggatttcagcctacatacggagtcgggtatcaaccctatagagtcgtggtgttgtcatttgaacttctccatgcacctgctactgtctgtggtccaaaaaagtccactaatcttgtaaaaaacaaa

SEQ ID NO: 251 - protein, 447 aa, synthetic construct
  REGION 1..447: note = Synthetic
NITNLCPFGEVFNATRFASVYAWNRKRISNCVADYSVLYNSASFSTFKCYGVSPTKLNDLCFTNVYADSFVIRGDEVRQIAPGQTGTIADYNYKLPDDFTGCVIAWNSNNLDSKVGGNYNYRYRLFRKSNLKPFERDISTEIYQAGSTPCNGVKGFNCYFPLQSYGFQPTYGVGYQPYRVVVLSFELLHAPATVCGPKKSTNLVKNKGSGGGGDGGGGSGDKTHTCPPCPAPELLGGPSVFLFPPKPKDTLMISRTPEVTCVVVDVSHEDPEVKFNWYVDGVEVHNAKTKPREEQYNSTYRVVSVLTVLHQDWLNGKEYKCKVSNKALPAPIEKTISKAKGQPREPQVYTLPPSREELTKNQVSLTCLVKGFYPSDIAVEWESNGQPENNYKTTPPVLDSDGSFFLYSKLTVDKSRWQQGNVFSCSVMHEALHNHYTQKSLSLSPGS

SEQ ID NO: 252 - DNA, 1341 bp, synthetic construct
  misc_feature 1..1341: note = Synthetic
  source 1..1341: mol_type = other DNA
aatatcactaatctttgccccttcggggaagtatttaacgctactcgatttgctagcgtatatgcctggaaccggaagagaataagcaactgtgttgcagactatagcgtgctttacaattccgcatcctttagtaccttcaaatgttacggtgtgagccccaccaaactcaatgatctctgtttcacaaacgtgtacgcagatagtttcgttatacgcggggacgaagtacggcagatagcccctggccagacaggaaccatagccgattacaactacaaacttccagacgattttacagggtgtgtgatcgcttggaattcaaataacctggactccaaagtgggaggcaactataattacagataccgactgttccgcaaaagcaacttgaaacctttcgagcgagatatatcaaccgaaatctaccaagctggttctacaccttgtaatggtgtgaagggatttaactgctacttccctcttcagtcctatggatttcagcctacatacggagtcgggtatcaaccctatagagtcgtggtgttgtcatttgaacttctccatgcacctgctactgtctgtggtccaaaaaagtccactaatcttgtaaaaaacaaaggatccggcggcggcggtgacggtggtggcggctccggagacaagacccacacctgccccccttgtcctgcccctgagctgctgggcggaccctccgtgtttctgttcccccccaagcccaaggacaccctgatgatcagccggacccccgaggtcacctgcgtggtggtggacgtcagccacgaggacccagaggtcaagttcaattggtatgtggacggcgtggaggtgcacaacgccaagaccaagccccgggaggaacagtacaacagcacctaccgggtggtgtccgtgctgaccgtgctgcaccaggactggctgaacggcaaagaatacaagtgcaaggtgtccaacaaggccctgcctgcccccatcgagaaaaccatcagcaaggccaagggccagcccagagaaccccaggtgtacaccctgccccctagcagggaagagctgaccaagaaccaggtgtccctgacctgtctggtcaagggcttctaccccagcgatatcgccgtggagtgggagagcaacggccagcctgagaacaactacaagaccaccccccctgtgctggacagcgacggcagcttcttcctgtacagcaagctgaccgtggacaagagccggtggcagcagggcaacgtgtttagctgcagcgtgatgcacgaggccctgcacaaccactacacccagaagagcttaagcctgtcccctggcagt

SEQ ID NO: 253 - protein, 207 aa, synthetic construct
  REGION 1..207: note = Synthetic
NITNLCPFGEVFNATRFASVYAWNRKRISNCVADYSVLYNSASFSTFKCYGVSPTKLNDLCFTNVYADSFVIRGDEVRQIAPGQTGNIADYNYKLPDDFTGCVIAWNSNNLDSKVGGNYNYLYRLFRKSNLKPFERDISTEIYQAGSTPCNGVKGFNCYFPLQSYGFQPTYGVGYQPYRVVVLSFELLHAPATVCGPKKSTNLVKNK

SEQ ID NO: 254 - DNA, 621 bp, synthetic construct
  misc_feature 1..621: note = Synthetic
  source 1..621: mol_type = other DNA
aatatcactaatctttgccccttcggggaagtatttaacgctactcgatttgctagcgtatatgcctggaaccggaagagaataagcaactgtgttgcagactatagcgtgctttacaattccgcatcctttagtaccttcaaatgttacggtgtgagccccaccaaactcaatgatctctgtttcacaaacgtgtacgcagatagtttcgttatacgcggggacgaagtacggcagatagcccctggccagacaggaaacatagccgattacaactacaaacttccagacgattttacagggtgtgtgatcgcttggaattcaaataacctggactccaaagtgggaggcaactataattacctgtaccgactgttccgcaaaagcaacttgaaacctttcgagcgagatatatcaaccgaaatctaccaagctggttctacaccttgtaatggtgtgaagggatttaactgctacttccctcttcagtcctatggatttcagcctacatacggagtcgggtatcaaccctatagagtcgtggtgttgtcatttgaacttctccatgcacctgctactgtctgtggtccaaaaaagtccactaatcttgtaaaaaacaaa

SEQ ID NO: 255 - protein, 447 aa, synthetic construct
  REGION 1..447: note = Synthetic
NITNLCPFGEVFNATRFASVYAWNRKRISNCVADYSVLYNSASFSTFKCYGVSPTKLNDLCFTNVYADSFVIRGDEVRQIAPGQTGNIADYNYKLPDDFTGCVIAWNSNNLDSKVGGNYNYLYRLFRKSNLKPFERDISTEIYQAGSTPCNGVKGFNCYFPLQSYGFQPTYGVGYQPYRVVVLSFELLHAPATVCGPKKSTNLVKNKGSGGGGDGGGGSGDKTHTCPPCPAPELLGGPSVFLFPPKPKDTLMISRTPEVTCVVVDVSHEDPEVKFNWYVDGVEVHNAKTKPREEQYNSTYRVVSVLTVLHQDWLNGKEYKCKVSNKALPAPIEKTISKAKGQPREPQVYTLPPSREELTKNQVSLTCLVKGFYPSDIAVEWESNGQPENNYKTTPPVLDSDGSFFLYSKLTVDKSRWQQGNVFSCSVMHEALHNHYTQKSLSLSPGS

SEQ ID NO: 256 - DNA, 1383 bp, synthetic construct
  misc_feature 1..1383: note = Synthetic
  source 1..1383: mol_type = other DNA
aatatcactaatctttgccccttcggggaagtatttaacgctactcgatttgctagcgtatatgcctggaaccggaagagaataagcaactgtgttgcagactatagcgtgctttacaattccgcatcctttagtaccttcaaatgttacggtgtgagccccaccaaactcaatgatctctgtttcacaaacgtgtacgcagatagtttcgttatacgcggggacgaagtacggcagatagcccctggccagacaggaaacatagccgattacaactacaaacttccagacgattttacagggtgtgtgatcgcttggaattcaaataacctggactccaaagtgggaggcaactataattacctgtaccgactgttccgcaaaagcaacttgaaacctttcgagcgagatatatcaaccgaaatctaccaagctggttctacaccttgtaatggtgtgaagggatttaactgctacttccctcttcagtcctatggatttcagcctacatacggagtcgggtatcaaccctatagagtcgtggtgttgtcatttgaacttctccatgcacctgctactgtctgtggtccaaaaaagtccactaatcttgtaaaaaacaaaggatccggatccggatccggatccggatccggatccggatccggatccggcggcggcggtgacggtggtggcggctccggagacaagacccacacctgccccccttgtcctgcccctgagctgctgggcggaccctccgtgtttctgttcccccccaagcccaaggacaccctgatgatcagccggacccccgaggtcacctgcgtggtggtggacgtcagccacgaggacccagaggtcaagttcaattggtatgtggacggcgtggaggtgcacaacgccaagaccaagccccgggaggaacagtacaacagcacctaccgggtggtgtccgtgctgaccgtgctgcaccaggactggctgaacggcaaagaatacaagtgcaaggtgtccaacaaggccctgcctgcccccatcgagaaaaccatcagcaaggccaagggccagcccagagaaccccaggtgtacaccctgccccctagcagggaagagctgaccaagaaccaggtgtccctgacctgtctggtcaagggcttctaccccagcgatatcgccgtggagtgggagagcaacggccagcctgagaacaactacaagaccaccccccctgtgctggacagcgacggcagcttcttcctgtacagcaagctgaccgtggacaagagccggtggcagcagggcaacgtgtttagctgcagcgtgatgcacgaggccctgcacaaccactacacccagaagagcttaagcctgtcccctggcagt

SEQ ID NO: 257 - protein, 207 aa, synthetic construct
  REGION 1..207: note = Synthetic
NITNLCPFGEVFNATRFASVYAWNRKRISNCVADYSVLYNSASFSTFKCYGVSPTKLNDLCFTNVYADSFVIRGDEVRQIAPGQTGTIADYNYKLPDDFTGCVIAWNSNNLDSKVGGNYNYLYRLFRKSNLKPFERDISTEIYQAGSTPCNGVKGFNCYFPLQSYGFQPTYGVGYQPYRVVVLSFELLHAPATVCGPKKSTNLVKNK

SEQ ID NO: 258 - DNA, 621 bp, synthetic construct
  misc_feature 1..621: note = Synthetic
  source 1..621: mol_type = other DNA
aatatcactaatctttgccccttcggggaagtatttaacgctactcgatttgctagcgtatatgcctggaaccggaagagaataagcaactgtgttgcagactatagcgtgctttacaattccgcatcctttagtaccttcaaatgttacggtgtgagccccaccaaactcaatgatctctgtttcacaaacgtgtacgcagatagtttcgttatacgcggggacgaagtacggcagatagcccctggccagacaggaaccatagccgattacaactacaaacttccagacgattttacagggtgtgtgatcgcttggaattcaaataacctggactccaaagtgggaggcaactataattacctgtaccgactgttccgcaaaagcaacttgaaacctttcgagcgagatatatcaaccgaaatctaccaagctggttctacaccttgtaatggtgtgaagggatttaactgctacttccctcttcagtcctatggatttcagcctacatacggagtcgggtatcaaccctatagagtcgtggtgttgtcatttgaacttctccatgcacctgctactgtctgtggtccaaaaaagtccactaatcttgtaaaaaacaaa

SEQ ID NO: 259 - protein, 447 aa, synthetic construct
  REGION 1..447: note = Synthetic
NITNLCPFGEVFNATRFASVYAWNRKRISNCVADYSVLYNSASFSTFKCYGVSPTKLNDLCFTNVYADSFVIRGDEVRQIAPGQTGTIADYNYKLPDDFTGCVIAWNSNNLDSKVGGNYNYLYRLFRKSNLKPFERDISTEIYQAGSTPCNGVKGFNCYFPLQSYGFQPTYGVGYQPYRVVVLSFELLHAPATVCGPKKSTNLVKNKGSGGGGDGGGGSGDKTHTCPPCPAPELLGGPSVFLFPPKPKDTLMISRTPEVTCVVVDVSHEDPEVKFNWYVDGVEVHNAKTKPREEQYNSTYRVVSVLTVLHQDWLNGKEYKCKVSNKALPAPIEKTISKAKGQPREPQVYTLPPSREELTKNQVSLTCLVKGFYPSDIAVEWESNGQPENNYKTTPPVLDSDGSFFLYSKLTVDKSRWQQGNVFSCSVMHEALHNHYTQKSLSLSPGS

SEQ ID NO: 260 - DNA, 1347 bp, synthetic construct
  misc_feature 1..1347: note = Synthetic
  source 1..1347: mol_type = other DNA
aatatcactaatctttgccccttcggggaagtatttaacgctactcgatttgctagcgtatatgcctggaaccggaagagaataagcaactgtgttgcagactatagcgtgctttacaattccgcatcctttagtaccttcaaatgttacggtgtgagccccaccaaactcaatgatctctgtttcacaaacgtgtacgcagatagtttcgttatacgcggggacgaagtacggcagatagcccctggccagacaggaaccatagccgattacaactacaaacttccagacgattttacagggtgtgtgatcgcttggaattcaaataacctggactccaaagtgggaggcaactataattacctgtaccgactgttccgcaaaagcaacttgaaacctttcgagcgagatatatcaaccgaaatctaccaagctggttctacaccttgtaatggtgtgaagggatttaactgctacttccctcttcagtcctatggatttcagcctacatacggagtcgggtatcaaccctatagagtcgtggtgttgtcatttgaacttctccatgcacctgctactgtctgtggtccaaaaaagtccactaatcttgtaaaaaacaaaggatccggatccggcggcggcggtgacggtggtggcggctccggagacaagacccacacctgccccccttgtcctgcccctgagctgctgggcggaccctccgtgtttctgttcccccccaagcccaaggacaccctgatgatcagccggacccccgaggtcacctgcgtggtggtggacgtcagccacgaggacccagaggtcaagttcaattggtatgtggacggcgtggaggtgcacaacgccaagaccaagccccgggaggaacagtacaacagcacctaccgggtggtgtccgtgctgaccgtgctgcaccaggactggctgaacggcaaagaatacaagtgcaaggtgtccaacaaggccctgcctgcccccatcgagaaaaccatcagcaaggccaagggccagcccagagaaccccaggtgtacaccctgccccctagcagggaagagctgaccaagaaccaggtgtccctgacctgtctggtcaagggcttctaccccagcgatatcgccgtggagtgggagagcaacggccagcctgagaacaactacaagaccaccccccctgtgctggacagcgacggcagcttcttcctgtacagcaagctgaccgtggacaagagccggtggcagcagggcaacgtgtttagctgcagcgtgatgcacgaggccctgcacaaccactacacccagaagagcttaagcctgtcccctggcagt

SEQ ID NO: 261 - protein, 207 aa, synthetic construct
  REGION 1..207: note = Synthetic
NITNLCPFGEVFNATRFASVYAWNRKRISNCVADYSVLYNSASFSTFKCYGVSPTKLNDLCFTNVYADSFVIRGDEVRQIAPGQTGKIADYNYKLPDDFTGCVIAWNSNNLDSKVGGNYNYRYRLFRKSNLKPFERDISTEIYQAGSKPCNGVEGFNCYFPLQSYGFQPTNGVGYQPYRVVVLSFELLHAPATVCGPKKSTNLVKNK

SEQ ID NO: 262 - DNA, 621 bp, synthetic construct
  misc_feature 1..621: note = Synthetic
  source 1..621: mol_type = other DNA
aatatcactaatctttgccccttcggggaagtatttaacgctactcgatttgctagcgtatatgcctggaaccggaagagaataagcaactgtgttgcagactatagcgtgctttacaattccgcatcctttagtaccttcaaatgttacggtgtgagccccaccaaactcaatgatctctgtttcacaaacgtgtacgcagatagtttcgttatacgcggggacgaagtacggcagatagcccctggccagacaggaaagatagccgattacaactacaaacttccagacgattttacagggtgtgtgatcgcttggaattcaaataacctggactccaaagtgggaggcaactataattacagataccgactgttccgcaaaagcaacttgaaacctttcgagcgagatatatcaaccgaaatctaccaagctggttctaaaccttgtaatggtgtggagggatttaactgctacttccctcttcagtcctatggatttcagcctacaaatggagtcgggtatcaaccctatagagtcgtggtgttgtcatttgaacttctccatgcacctgctactgtctgtggtccaaaaaagtccactaatcttgtaaaaaacaaa

SEQ ID NO: 263 - protein, 447 aa, synthetic construct
  REGION 1..447: note = Synthetic
NITNLCPFGEVFNATRFASVYAWNRKRISNCVADYSVLYNSASFSTFKCYGVSPTKLNDLCFTNVYADSFVIRGDEVRQIAPGQTGKIADYNYKLPDDFTGCVIAWNSNNLDSKVGGNYNYRYRLFRKSNLKPFERDISTEIYQAGSKPCNGVEGFNCYFPLQSYGFQPTNGVGYQPYRVVVLSFELLHAPATVCGPKKSTNLVKNKGSGGGGDGGGGSGDKTHTCPPCPAPELLGGPSVFLFPPKPKDTLMISRTPEVTCVVVDVSHEDPEVKFNWYVDGVEVHNAKTKPREEQYNSTYRVVSVLTVLHQDWLNGKEYKCKVSNKALPAPIEKTISKAKGQPREPQVYTLPPSREELTKNQVSLTCLVKGFYPSDIAVEWESNGQPENNYKTTPPVLDSDGSFFLYSKLTVDKSRWQQGNVFSCSVMHEALHNHYTQKSLSLSPGS

SEQ ID NO: 264 - DNA, 1347 bp, synthetic construct
  misc_feature 1..1347: note = Synthetic
  source 1..1347: mol_type = other DNA
aatatcactaatctttgccccttcggggaagtatttaacgctactcgatttgctagcgtatatgcctggaaccggaagagaataagcaactgtgttgcagactatagcgtgctttacaattccgcatcctttagtaccttcaaatgttacggtgtgagccccaccaaactcaatgatctctgtttcacaaacgtgtacgcagatagtttcgttatacgcggggacgaagtacggcagatagcccctggccagacaggaaagatagccgattacaactacaaacttccagacgattttacagggtgtgtgatcgcttggaattcaaataacctggactccaaagtgggaggcaactataattacagataccgactgttccgcaaaagcaacttgaaacctttcgagcgagatatatcaaccgaaatctaccaagctggttctaaaccttgtaatggtgtggagggatttaactgctacttccctcttcagtcctatggatttcagcctacaaatggagtcgggtatcaaccctatagagtcgtggtgttgtcatttgaacttctccatgcacctgctactgtctgtggtccaaaaaagtccactaatcttgtaaaaaacaaaggatccggatccggcggcggcggtgacggtggtggcggctccggagacaagacccacacctgccccccttgtcctgcccctgagctgctgggcggaccctccgtgtttctgttcccccccaagcccaaggacaccctgatgatcagccggacccccgaggtcacctgcgtggtggtggacgtcagccacgaggacccagaggtcaagttcaattggtatgtggacggcgtggaggtgcacaacgccaagaccaagccccgggaggaacagtacaacagcacctaccgggtggtgtccgtgctgaccgtgctgcaccaggactggctgaacggcaaagaatacaagtgcaaggtgtccaacaaggccctgcctgcccccatcgagaaaaccatcagcaaggccaagggccagcccagagaaccccaggtgtacaccctgccccctagcagggaagagctgaccaagaaccaggtgtccctgacctgtctggtcaagggcttctaccccagcgatatcgccgtggagtgggagagcaacggccagcctgagaacaactacaagaccaccccccctgtgctggacagcgacggcagcttcttcctgtacagcaagctgaccgtggacaagagccggtggcagcagggcaacgtgtttagctgcagcgtgatgcacgaggccctgcacaaccactacacccagaagagcttaagcctgtcccctggcagt

SEQ ID NO: 265 - protein, 207 aa, synthetic construct
  REGION 1..207: note = Synthetic
NITNLCPFGEVFNATRFASVYAWNRKRISNCVADYSVLYNSASFSTFKCYGVSPTKLNDLCFTNVYADSFVIRGDEVRQIAPGQTGNIADYNYKLPDDFTGCVIAWNSNNLDSKVGGNYNYRYRLFRKSNLKPFERDISTEIYQAGSKPCNGVEGFNCYFPLQSYGFQPTNGVGYQPYRVVVLSFELLHAPATVCGPKKSTNLVKNK

SEQ ID NO: 266 - DNA, 621 bp, synthetic construct
  misc_feature 1..621: note = Synthetic
  source 1..621: mol_type = other DNA
aatatcactaatctttgccccttcggggaagtatttaacgctactcgatttgctagcgtatatgcctggaaccggaagagaataagcaactgtgttgcagactatagcgtgctttacaattccgcatcctttagtaccttcaaatgttacggtgtgagccccaccaaactcaatgatctctgtttcacaaacgtgtacgcagatagtttcgttatacgcggggacgaagtacggcagatagcccctggccagacaggaaacatagccgattacaactacaaacttccagacgattttacagggtgtgtgatcgcttggaattcaaataacctggactccaaagtgggaggcaactataattacagataccgactgttccgcaaaagcaacttgaaacctttcgagcgagatatatcaaccgaaatctaccaagctggttctaaaccttgtaatggtgtggagggatttaactgctacttccctcttcagtcctatggatttcagcctacaaatggagtcgggtatcaaccctatagagtcgtggtgttgtcatttgaacttctccatgcacctgctactgtctgtggtccaaaaaagtccactaatcttgtaaaaaacaaa

SEQ ID NO: 267 - protein, 447 aa, synthetic construct
  REGION 1..447: note = Synthetic
NITNLCPFGEVFNATRFASVYAWNRKRISNCVADYSVLYNSASFSTFKCYGVSPTKLNDLCFTNVYADSFVIRGDEVRQIAPGQTGNIADYNYKLPDDFTGCVIAWNSNNLDSKVGGNYNYRYRLFRKSNLKPFERDISTEIYQAGSKPCNGVEGFNCYFPLQSYGFQPTNGVGYQPYRVVVLSFELLHAPATVCGPKKSTNLVKNKGSGGGGDGGGGSGDKTHTCPPCPAPELLGGPSVFLFPPKPKDTLMISRTPEVTCVVVDVSHEDPEVKFNWYVDGVEVHNAKTKPREEQYNSTYRVVSVLTVLHQDWLNGKEYKCKVSNKALPAPIEKTISKAKGQPREPQVYTLPPSREELTKNQVSLTCLVKGFYPSDIAVEWESNGQPENNYKTTPPVLDSDGSFFLYSKLTVDKSRWQQGNVFSCSVMHEALHNHYTQKSLSLSPGS

SEQ ID NO: 268 - DNA, 1347 bp, synthetic construct
  misc_feature 1..1347: note = Synthetic
  source 1..1347: mol_type = other DNA
aatatcactaatctttgccccttcggggaagtatttaacgctactcgatttgctagcgtatatgcctggaaccggaagagaataagcaactgtgttgcagactatagcgtgctttacaattccgcatcctttagtaccttcaaatgttacggtgtgagccccaccaaactcaatgatctctgtttcacaaacgtgtacgcagatagtttcgttatacgcggggacgaagtacggcagatagcccctggccagacaggaaacatagccgattacaactacaaacttccagacgattttacagggtgtgtgatcgcttggaattcaaataacctggactccaaagtgggaggcaactataattacagataccgactgttccgcaaaagcaacttgaaacctttcgagcgagatatatcaaccgaaatctaccaagctggttctaaaccttgtaatggtgtggagggatttaactgctacttccctcttcagtcctatggatttcagcctacaaatggagtcgggtatcaaccctatagagtcgtggtgttgtcatttgaacttctccatgcacctgctactgtctgtggtccaaaaaagtccactaatcttgtaaaaaacaaaggatccggatccggcggcggcggtgacggtggtggcggctccggagacaagacccacacctgccccccttgtcctgcccctgagctgctgggcggaccctccgtgtttctgttcccccccaagcccaaggacaccctgatgatcagccggacccccgaggtcacctgcgtggtggtggacgtcagccacgaggacccagaggtcaagttcaattggtatgtggacggcgtggaggtgcacaacgccaagaccaagccccgggaggaacagtacaacagcacctaccgggtggtgtccgtgctgaccgtgctgcaccaggactggctgaacggcaaagaatacaagtgcaaggtgtccaacaaggccctgcctgcccccatcgagaaaaccatcagcaaggccaagggccagcccagagaaccccaggtgtacaccctgccccctagcagggaagagctgaccaagaaccaggtgtccctgacctgtctggtcaagggcttctaccccagcgatatcgccgtggagtgggagagcaacggccagcctgagaacaactacaagaccaccccccctgtgctggacagcgacggcagcttcttcctgtacagcaagctgaccgtggacaagagccggtggcagcagggcaacgtgtttagctgcagcgtgatgcacgaggccctgcacaaccactacacccagaagagcttaagcctgtcccctggcagt

SEQ ID NO: 269 - protein, 207 aa, synthetic construct
  REGION 1..207: note = Synthetic
NITNLCPFGEVFNATKFASVYAWNRKRISNCVADYSVLYNSASFSTFKCYGVSPTKLNDLCFTNVYADSFVIRGDEVRQIAPGQTGKIADYNYKLPDDFTGCVIAWNSNNLDSKVGGNYNYLYRLFRKSNLKPFERDISTEIYQAGSTPCNGVKGFNCYFPLQSYGFQPTYGVGYQPYRVVVLSFELLHAPATVCGPKKSTNLVKNK

SEQ ID NO: 270 - DNA, 621 bp, synthetic construct
  misc_feature 1..621: note = Synthetic
  source 1..621: mol_type = other DNA
aatatcactaatctttgccccttcggggaagtatttaacgctactaaatttgctagcgtatatgcctggaaccggaagagaataagcaactgtgttgcagactatagcgtgctttacaattccgcatcctttagtaccttcaaatgttacggtgtgagccccaccaaactcaatgatctctgtttcacaaacgtgtacgcagatagtttcgttatacgcggggacgaagtacggcagatagcccctggccagacaggaaagatagccgattacaactacaaacttccagacgattttacagggtgtgtgatcgcttggaattcaaataacctggactccaaagtgggaggcaactataattacctgtaccgactgttccgcaaaagcaacttgaaacctttcgagcgagatatatcaaccgaaatctaccaagctggttctacaccttgtaatggtgtgaagggatttaactgctacttccctcttcagtcctatggatttcagcctacatacggagtcgggtatcaaccctatagagtcgtggtgttgtcatttgaacttctccatgcacctgctactgtctgtggtccaaaaaagtccactaatcttgtaaaaaacaaa

SEQ ID NO: 271 - protein, 447 aa, synthetic construct
  REGION 1..447: note = Synthetic
NITNLCPFGEVFNATKFASVYAWNRKRISNCVADYSVLYNSASFSTFKCYGVSPTKLNDLCFTNVYADSFVIRGDEVRQIAPGQTGKIADYNYKLPDDFTGCVIAWNSNNLDSKVGGNYNYLYRLFRKSNLKPFERDISTEIYQAGSTPCNGVKGFNCYFPLQSYGFQPTYGVGYQPYRVVVLSFELLHAPATVCGPKKSTNLVKNKGSGGGGDGGGGSGDKTHTCPPCPAPELLGGPSVFLFPPKPKDTLMISRTPEVTCVVVDVSHEDPEVKFNWYVDGVEVHNAKTKPREEQYNSTYRVVSVLTVLHQDWLNGKEYKCKVSNKALPAPIEKTISKAKGQPREPQVYTLPPSREELTKNQVSLTCLVKGFYPSDIAVEWESNGQPENNYKTTPPVLDSDGSFFLYSKLTVDKSRWQQGNVFSCSVMHEALHNHYTQKSLSLSPGS

SEQ ID NO: 272 - DNA, 621 bp, synthetic construct; identical to SEQ ID NO: 270
  misc_feature 1..621: note = Synthetic
  source 1..621: mol_type = other DNA

SEQ ID NO: 273 - protein, 207 aa, synthetic construct
  REGION 1..207: note = Synthetic
NITNLCPFGEVFNATKFASVYAWNRKRISNCVADYSVLYNSASFSTFKCYGVSPTKLNDLCFTNVYADSFVIRGDEVRQIAPGQTGKIADYNYKLPDDFTGCVIAWNSNNLDSKVGGNYNYLYRLFRKSNLKPFERDISTEIYQAGSRPCNGVKGFNCYFPLQSYGFQPTNGVGYQPYRVVVLSFELLHAPATVCGPKKSTNLVKNK

SEQ ID NO: 274 - DNA, 621 bp, synthetic construct
  misc_feature 1..621: note = Synthetic
  source 1..621: mol_type = other DNA
aatatcactaatctttgccccttcggggaagtatttaacgctactaaatttgctagcgtatatgcctggaaccggaagagaataagcaactgtgttgcagactatagcgtgctttacaattccgcatcctttagtaccttcaaatgttacggtgtgagccccaccaaactcaatgatctctgtttcacaaacgtgtacgcagatagtttcgttatacgcggggacgaagtacggcagatagcccctggccagacaggaaagatagccgattacaactacaaacttccagacgattttacagggtgtgtgatcgcttggaattcaaataacctggactccaaagtgggaggcaactataattacctgtaccgactgttccgcaaaagcaacttgaaacctttcgagcgagatatatcaaccgaaatctaccaagctggttctagaccttgtaatggtgtgaagggatttaactgctacttccctcttcagtcctatggatttcagcctacaaatggagtcgggtatcaaccctatagagtcgtggtgttgtcatttgaacttctccatgcacctgctactgtctgtggtccaaaaaagtccactaatcttgtaaaaaacaaa

SEQ ID NO: 275 - protein, 447 aa, synthetic construct
  REGION 1..447: note = Synthetic
NITNLCPFGEVFNATKFASVYAWNRKRISNCVADYSVLYNSASFSTFKCYGVSPTKLNDLCFTNVYADSFVIRGDEVRQIAPGQTGKIADYNYKLPDDFTGCVIAWNSNNLDSKVGGNYNYLYRLFRKSNLKPFERDISTEIYQAGSRPCNGVKGFNCYFPLQSYGFQPTNGVGYQPYRVVVLSFELLHAPATVCGPKKSTNLVKNKGSGGGGDGGGGSGDKTHTCPPCPAPELLGGPSVFLFPPKPKDTLMISRTPEVTCVVVDVSHEDPEVKFNWYVDGVEVHNAKTKPREEQYNSTYRVVSVLTVLHQDWLNGKEYKCKVSNKALPAPIEKTISKAKGQPREPQVYTLPPSREELTKNQVSLTCLVKGFYPSDIAVEWESNGQPENNYKTTPPVLDSDGSFFLYSKLTVDKSRWQQGNVFSCSVMHEALHNHYTQKSLSLSPGS

SEQ ID NO: 276 - DNA, 1341 bp, synthetic construct
  misc_feature 1..1341: note = Synthetic
  source 1..1341: mol_type = other DNA
aatatcactaatctttgccccttcggggaagtatttaacgctactaaatttgctagcgtatatgcctggaaccggaagagaataagcaactgtgttgcagactatagcgtgctttacaattccgcatcctttagtaccttcaaatgttacggtgtgagccccaccaaactcaatgatctctgtttcacaaacgtgtacgcagatagtttcgttatacgcggggacgaagtacggcagatagcccctggccagacaggaaagatagccgattacaactacaaacttccagacgattttacagggtgtgtgatcgcttggaattcaaataacctggactccaaagtgggaggcaactataattacctgtaccgactgttccgcaaaagcaacttgaaacctttcgagcgagatatatcaaccgaaatctaccaagctggttctagaccttgtaatggtgtgaagggatttaactgctacttccctcttcagtcctatggatttcagcctacaaatggagtcgggtatcaaccctatagagtcgtggtgttgtcatttgaacttctccatgcacctgctactgtctgtggtccaaaaaagtccactaatcttgtaaaaaacaaaggatccggcggcggcggtgacggtggtggcggctccggagacaagacccacacctgccccccttgtcctgcccctgagctgctgggcggaccctccgtgtttctgttcccccccaagcccaaggacaccctgatgatcagccggacccccgaggtcacctgcgtggtggtggacgtcagccacgaggacccagaggtcaagttcaattggtatgtggacggcgtggaggtgcacaacgccaagaccaagccccgggaggaacagtacaacagcacctaccgggtggtgtccgtgctgaccgtgctgcaccaggactggctgaacggcaaagaatacaagtgcaaggtgtccaacaaggccctgcctgcccccatcgagaaaaccatcagcaaggccaagggccagcccagagaaccccaggtgtacaccctgccccctagcagggaagagctgaccaagaaccaggtgtccctgacctgtctggtcaagggcttctaccccagcgatatcgccgtggagtgggagagcaacggccagcctgagaacaactacaagaccaccccccctgtgctggacagcgacggcagcttcttcctgtacagcaagctgaccgtggacaagagccggtggcagcagggcaacgtgtttagctgcagcgtgatgcacgaggccctgcacaaccactacacccagaagagcttaagcctgtcccctggcagt

SEQ ID NO: 277 - protein, 207 aa, synthetic construct
  REGION 1..207: note = Synthetic
NITNLCPFGEVFNATKFASVYAWNRKRISNCVADYSVLYNSASFSTFKCYGVSPTKLNDLCFTNVYADSFVIRGDEVRQIAPGQTGNIADYNYKLPDDFTGCVIAWNSNNLDSKVGGNYNYRYRLFRKSNLKPFERDISTEIYQAGSKPCNGVKGFNCYFPLQSYGFQPTYGVGYQPYRVVVLSFELLHAPATVCGPKKSTNLVKNK

SEQ ID NO: 278 - DNA, 621 bp, synthetic construct
  misc_feature 1..621: note = Synthetic
  source 1..621: mol_type = other DNA
aatatcactaatctttgccccttcggggaagtatttaacgctactaaatttgctagcgtatatgcctggaaccggaagagaataagcaactgtgttgcagactatagcgtgctttacaattccgcatcctttagtaccttcaaatgttacggtgtgagccccaccaaactcaatgatctctgtttcacaaacgtgtacgcagatagtttcgttatacgcggggacgaagtacggcagatagcccctggccagacaggaaacatagccgattacaactacaaacttccagacgattttacagggtgtgtgatcgcttggaattcaaataacctggactccaaagtgggaggcaactataattacagataccgactgttccgcaaaagcaacttgaaacctttcgagcgagatatatcaaccgaaatctaccaagctggttctaaaccttgtaatggtgtgaagggatttaactgctacttccctcttcagtcctatggatttcagcctacatacggagtcgggtatcaaccctatagagtcgtggtgttgtcatttgaacttctccatgcacctgctactgtctgtggtccaaaaaagtccactaatcttgtaaaaaacaaa

SEQ ID NO: 279 - protein, 447 aa, synthetic construct
  REGION 1..447: note = Synthetic
NITNLCPFGEVFNATKFASVYAWNRKRISNCVADYSVLYNSASFSTFKCYGVSPTKLNDLCFTNVYADSFVIRGDEVRQIAPGQTGNIADYNYKLPDDFTGCVIAWNSNNLDSKVGGNYNYRYRLFRKSNLKPFERDISTEIYQAGSKPCNGVKGFNCYFPLQSYGFQPTYGVGYQPYRVVVLSFELLHAPATVCGPKKSTNLVKNKGSGGGGDGGGGSGDKTHTCPPCPAPELLGGPSVFLFPPKPKDTLMISRTPEVTCVVVDVSHEDPEVKFNWYVDGVEVHNAKTKPREEQYNSTYRVVSVLTVLHQDWLNGKEYKCKVSNKALPAPIEKTISKAKGQPREPQVYTLPPSREELTKNQVSLTCLVKGFYPSDIAVEWESNGQPENNYKTTPPVLDSDGSFFLYSKLTVDKSRWQQGNVFSCSVMHEALHNHYTQKSLSLSPGS

SEQ ID NO: 280 - DNA, 1341 bp, synthetic construct
  misc_feature 1..1341: note = Synthetic
  source 1..1341: mol_type = other DNA
aatatcactaatctttgccccttcggggaagtatttaacgctactaaatttgctagcgtatatgcctggaaccggaagagaataagcaactgtgttgcagactatagcgtgctttacaattccgcatcctttagtaccttcaaatgttacggtgtgagccccaccaaactcaatgatctctgtttcacaaacgtgtacgcagatagtttcgttatacgcggggacgaagtacggcagatagcccctggccagacaggaaacatagccgattacaactacaaacttccagacgattttacagggtgtgtgatcgcttggaattcaaataacctggactccaaagtgggaggcaactataattacagataccgactgttccgcaaaagcaacttgaaacctttcgagcgagatatatcaaccgaaatctaccaagctggttctaaaccttgtaatggtgtgaagggatttaactgctacttccctcttcagtcctatggatttcagcctacatacggagtcgggtatcaaccctatagagtcgtggtgttgtcatttgaacttctccatgcacctgctactgtctgtggtccaaaaaagtccactaatcttgtaaaaaacaaaggatccggcggcggcggtgacggtggtggcggctccggagacaagacccacacctgccccccttgtcctgcccctgagctgctgggcggaccctccgtgtttctgttcccccccaagcccaaggacaccctgatgatcagccggacccccgaggtcacctgcgtggtggtggacgtcagccacgaggacccagaggtcaagttcaattggtatgtggacggcgtggaggtgcacaacgccaagaccaagccccgggaggaacagtacaacagcacctaccgggtggtgtccgtgctgaccgtgctgcaccaggactggctgaacggcaaagaatacaagtgcaaggtgtccaacaaggccctgcctgcccccatcgagaaaaccatcagcaaggccaagggccagcccagagaaccccaggtgtacaccctgccccctagcagggaagagctgaccaagaaccaggtgtccctgacctgtctggtcaagggcttctaccccagcgatatcgccgtggagtgggagagcaacggccagcctgagaacaactacaagaccaccccccctgtgctggacagcgacggcagcttcttcctgtacagcaagctgaccgtggacaagagccggtggcagcagggcaacgtgtttagctgcagcgtgatgcacgaggccctgcacaaccactacacccagaagagcttaagcctgtcccctggcagt

SEQ ID NO: 281 - protein, 207 aa, synthetic construct
  REGION 1..207: note = Synthetic
NITNLCPFGEVFNATKFASVYAWNRKRISNCVADYSVLYNSASFSTFKCYGVSPTKLNDLCFTNVYADSFVIRGDEVRQIAPGQTGNIADYNYKLPDDFTGCVIAWNSNNLDSKVGGNYNYRYRLFRKSNLKPFERDISTEIYQAGSRPCNGVKGFNCYFPLQSYGFQPTYGVGYQPYRVVVLSFELLHAPATVCGPKKSTNLVKNK

SEQ ID NO: 282 - DNA, 621 bp, synthetic construct
  misc_feature 1..621: note = Synthetic
  source 1..621: mol_type = other DNA
aatatcactaatctttgccccttcggggaagtatttaacgctactaaatttgctagcgtatatgcctggaaccggaagagaataagcaactgtgttgcagactatagcgtgctttacaattccgcatcctttagtaccttcaaatgttacggtgtgagccccaccaaactcaatgatctctgtttcacaaacgtgtacgcagatagtttcgttatacgcggggacgaagtacggcagatagcccctggccagacaggaaacatagccgattacaactacaaacttccagacgattttacagggtgtgtgatcgcttggaattcaaataacctggactccaaagtgggaggcaactataattacagataccgactgttccgcaaaagcaacttgaaacctttcgagcgagatatatcaaccgaaatctaccaagctggttctagaccttgtaatggtgtgaagggatttaactgctacttccctcttcagtcctatggatttcagcctacatacggagtcgggtatcaaccctatagagtcgtggtgttgtcatttgaacttctccatgcacctgctactgtctgtggtccaaaaaagtccactaatcttgtaaaaaacaaa

SEQ ID NO: 283 - protein, 447 aa, synthetic construct
  REGION 1..447: note = Synthetic
NITNLCPFGEVFNATKFASVYAWNRKRISNCVADYSVLYNSASFSTFKCYGVSPTKLNDLCFTNVYADSFVIRGDEVRQIAPGQTGNIADYNYKLPDDFTGCVIAWNSNNLDSKVGGNYNYRYRLFRKSNLKPFERDISTEIYQAGSRPCNGVKGFNCYFPLQSYGFQPTYGVGYQPYRVVVLSFELLHAPATVCGPKKSTNLVKNKGSGGGGDGGGGSGDKTHTCPPCPAPELLGGPSVFLFPPKPKDTLMISRTPEVTCVVVDVSHEDPEVKFNWYVDGVEVHNAKTKPREEQYNSTYRVVSVLTVLHQDWLNGKEYKCKVSNKALPAPIEKTISKAKGQPREPQVYTLPPSREELTKNQVSLTCLVKGFYPSDIAVEWESNGQPENNYKTTPPVLDSDGSFFLYSKLTVDKSRWQQGNVFSCSVMHEALHNHYTQKSLSLSPGS

SEQ ID NO: 284 - DNA, 1341 bp, synthetic construct
  misc_feature 1..1341: note = Synthetic
  source 1..1341: mol_type = other DNA
aatatcactaatctttgccccttcggggaagtatttaacgctactaaatttgctagcgtatatgcctggaaccggaagagaataagcaactgtgttgcagactatagcgtgctttacaattccgcatcctttagtaccttcaaatgttacggtgtgagccccaccaaactcaatgatctctgtttcacaaacgtgtacgcagatagtttcgttatacgcggggacgaagtacggcagatagcccctggccagacaggaaacatagccgattacaactacaaacttccagacgattttacagggtgtgtgatcgcttggaattcaaataacctggactccaaagtgggaggcaactataattacagataccgactgttccgcaaaagcaacttgaaacctttcgagcgagatatatcaaccgaaatctaccaagctggttctagaccttgtaatggtgtgaagggatttaactgctacttccctcttcagtcctatggatttcagcctacatacggagtcgggtatcaaccctatagagtcgtggtgttgtcatttgaacttctccatgcacctgctactgtctgtggtccaaaaaagtccactaatcttgtaaaaaacaaaggatccggcggcggcggtgacggtggtggcggctccggagacaagacccacacctgccccccttgtcctgcccctgagctgctgggcggaccctccgtgtttctgttcccccccaagcccaaggacaccctgatgatcagccggacccccgaggtcacctgcgtggtggtggacgtcagccacgaggacccagaggtcaagttcaattggtatgtggacggcgtggaggtgcacaacgccaagaccaagccccgggaggaacagtacaacagcacctaccgggtggtgtccgtgctgaccgtgctgcaccaggactggctgaacggcaaagaatacaagtgcaaggtgtccaacaaggccctgcctgcccccatcgagaaaaccatcagcaaggccaagggccagcccagagaaccccaggtgtacaccctgccccctagcagggaagagctgaccaagaaccaggtgtccctgacctgtctggtcaagggcttctaccccagcgatatcgccgtggagtgggagagcaacggccagcctgagaacaactacaagaccaccccccctgtgctggacagcgacggcagcttcttcctgtacagcaagctgaccgtggacaagagccggtggcagcagggcaacgtgtttagctgcagcgtgatgcacgaggccctgcacaaccactacacccagaagagcttaagcctgtcccctggcagt

SEQ ID NO: 285 - protein, 426 aa, synthetic construct
  REGION 1..426: note = Synthetic
NITNLCPFGEVFNATRFASVYAWNRKRISNCVADYSVLYNSASFSTFKCYGVSPTKLNDLCFTNVYADSFVIRGDEVRQIAPGQTGNIADYNYKLPDDFTGCVIAWNSNNLDSKVGGNYNYLYRLFRKSNLKPFERDISTEIYQAGSTPCNGVKGFNCYFPLQSYGFQPTYGVGYQPYRVVVLSFELLHAPATVCGPKKSTNLVKNKGSGGGGSGGGGSNITNLCPFGEVFNATRFASVYAWNRKRISNCVADYSVLYNSASFSTFKCYGVSPTKLNDLCFTNVYADSFVIRGDEVRQIAPGQTGNIADYNYKLPDDFTGCVIAWNSNNLDSKVGGNYNYLYRLFRKSNLKPFERDISTEIYQAGSTPCNGVKGFNCYFPLQSYGFQPTYGVGYQPYRVVVLSFELLHAPATVCGPKKSTNLVKNK

SEQ ID NO: 286 - DNA, 1278 bp, synthetic construct
  misc_feature 1..1278: note = Synthetic
  source 1..1278: mol_type = other DNA
aatatcacaaacttgtgcccatttggggaggtcttcaatgccactcggtttgcatcagtatatgcatggaatcgtaaacggatatcaaattgcgttgctgactattcagtcctctataatagtgctagtttcagtacatttaaatgctacggagtatctcctactaagttgaatgacctttgcttcacaaatgtctatgctgacagttttgttattaggggtgacgaggtgcggcagattgcacccgggcaaacaggaaacatcgctgactacaattacaaacttcctgatgacttcactggttgtgtgattgcttggaattccaacaatctggattccaaagtgggtgggaattacaattacttgtatagattgtttagaaaatctaacctcaagccattcgaacgggatataagcacagaaatctatcaggctgggagcacaccttgtaacggcgtaaaggggttcaattgctattttccacttcagtcatacggctttcaacccacctacggggtgggataccagccatatcgagtggtcgtactctctttcgagctgcttcatgcccccgcaaccgtgtgtggtcccaaaaaaagcaccaatctcgtcaagaataagggatcaggggggggcggatcaggcggtggaggcagcaacataactaatctttgtccattcggtgaagtctttaatgcaacccgttttgcttctgtgtatgcatggaacaggaaaagaatatccaattgcgttgccgactatagcgtcctttacaattctgcctcctttagcacatttaagtgttatggggtctcccccactaagctgaatgatctgtgtttcaccaacgtttatgcagactcctttgttatacggggggatgaagttcgacaaatagcacccgggcagacagggaacatcgctgactacaattacaagcttccagatgacttcactgggtgcgtaatcgcctggaacagtaacaacttggactctaaagtcggagggaattataattacctttatcgtctcttccgcaaaagtaacttgaagccttttgagagggacatttccacagagatatatcaagcaggttccacaccatgcaacggcgtcaagggatttaattgttatttccccctccaatcatacggctttcagccaacttacggcgttggctaccaaccatacagagtcgtagtgctttcctttgaactgctgcacgcccctgccactgtgtgtggcccaaaaaagagcaccaatttggtaaagaacaag

SEQ ID NO: 287 - protein, 666 aa, synthetic construct
  REGION 1..666: note = Synthetic
NITNLCPFGEVFNATRFASVYAWNRKRISNCVADYSVLYNSASFSTFKCYGVSPTKLNDLCFTNVYADSFVIRGDEVRQIAPGQTGNIADYNYKLPDDFTGCVIAWNSNNLDSKVGGNYNYLYRLFRKSNLKPFERDISTEIYQAGSTPCNGVKGFNCYFPLQSYGFQPTYGVGYQPYRVVVLSFELLHAPATVCGPKKSTNLVKNKGSGGGGSGGGGSNITNLCPFGEVFNATRFASVYAWNRKRISNCVADYSVLYNSASFSTFKCYGVSPTKLNDLCFTNVYADSFVIRGDEVRQIAPGQTGNIADYNYKLPDDFTGCVIAWNSNNLDSKVGGNYNYLYRLFRKSNLKPFERDISTEIYQAGSTPCNGVKGFNCYFPLQSYGFQPTYGVGYQPYRVVVLSFELLHAPATVCGPKKSTNLVKNKGSGGGGDGGGGSGDKTHTCPPCPAPELLGGPSVFLFPPKPKDTLMISRTPEVTCVVVDVSHEDPEVKFNWYVDGVEVHNAKTKPREEQYNSTYRVVSVLTVLHQDWLNGKEYKCKVSNKALPAPIEKTISKAKGQPREPQVYTLPPSREELTKNQVSLTCLVKGFYPSDIAVEWESNGQPENNYKTTPPVLDSDGSFFLYSKLTVDKSRWQQGNVFSCSVMHEALHNHYTQKSLSLSPGS

SEQ ID NO: 288 - DNA, 1998 bp, synthetic construct
  misc_feature 1..1998: note = Synthetic
  source 1..1998: mol_type = other DNA
aatatcacaaacttgtgcccatttggggaggtcttcaatgccactcggtttgcatcagtatatgcatggaatcgtaaacggatatcaaattgcgttgctgactattcagtcctctataatagtgctagtttcagtacatttaaatgctacggagtatctcctactaagttgaatgacctttgcttcacaaatgtctatgctgacagttttgttattaggggtgacgaggtgcggcagattgcacccgggcaaacaggaaacatcgctgactacaattacaaacttcctgatgacttcactggttgtgtgattgcttggaattccaacaatctggattccaaagtgggtgggaattacaattacttgtatagattgtttagaaaatctaacctcaagccattcgaacgggatataagcacagaaatctatcaggctgggagcacaccttgtaacggcgtaaaggggttcaattgctattttccacttcagtcatacggctttcaacccacctacggggtgggataccagccatatcgagtggtcgtactctctttcgagctgcttcatgcccccgcaaccgtgtgtggtcccaaaaaaagcaccaatctcgtcaagaataagggatcaggggggggcggatcaggcggtggaggcagcaacataactaatctttgtccattcggtgaagtctttaatgcaacccgttttgcttctgtgtatgcatggaacaggaaaagaatatccaattgcgttgccgactatagcgtcctttacaattctgcctcctttagcacatttaagtgttatggggtctcccccactaagctgaatgatctgtgtttcaccaacgtttatgcagactcctttgttatacggggggatgaagttcgacaaatagcacccgggcagacagggaacatcgctgactacaattacaagcttccagatgacttcactgggtgcgtaatcgcctggaacagtaacaacttggactctaaagtcggagggaattataattacctttatcgtctcttccgcaaaagtaacttgaagccttttgagagggacatttccacagagatatatcaagcaggttccacaccatgcaacggcgtcaagggatttaattgttatttccccctccaatcatacggctttcagccaacttacggcgttggctaccaaccatacagagtcgtagtgctttcctttgaactgctgcacgcccctgccactgtgtgtggcccaaaaaagagcaccaatttggtaaagaacaagggatccggcggcggcggtgacggtggtggcggctccggagacaagacccacacctgccccccttgtcctgcccctgagctgctgggcggaccctccgtgtttctgttcccccccaagcccaaggacaccctgatgatcagccggacccccgaggtcacctgcgtggtggtggacgtcagccacgaggacccagaggtcaagttcaattggtatgtggacggcgtggaggtgcacaacgccaagaccaagccccgggaggaacagtacaacagcacctaccgggtggtgtccgtgctgaccgtgctgcaccaggactggctgaacggcaaagaatacaagtgcaaggtgtccaacaaggccctgcctgcccccatcgagaaaaccatcagcaaggccaagggccagcccagagaaccccaggtgtacaccctgccccctagcagggaagagctgaccaagaaccaggtgtccctgacctgtctggtcaagggcttctaccccagcgatatcgccgtggagtgggagagcaacggccagcctgagaacaactacaagaccaccccccctgtgctggacagcgacggcagcttcttcctgtacagcaagctgaccgtggacaagagccggtggcagcagggcaacgtgtttagctgcagcgtgatgcacgaggccctgcacaaccactacacccagaagagcttaagcctgtcccctggcagt

SEQ ID NO: 289 - protein, 426 aa, synthetic construct
  REGION 1..426: note = Synthetic
NITNLCPFGEVFNATRFASVYAWNRKRISNCVADYSVLYNSASFSTFKCYGVSPTKLNDLCFTNVYADSFVIRGDEVRQIAPGQTGTIADYNYKLPDDFTGCVIAWNSNNLDSKVGGNYNYLYRLFRKSNLKPFERDISTEIYQAGSTPCNGVKGFNCYFPLQSYGFQPTYGVGYQPYRVVVLSFELLHAPATVCGPKKSTNLVKNKGSGGGGSGGGGSNITNLCPFGEVFNATRFASVYAWNRKRISNCVADYSVLYNSASFSTFKCYGVSPTKLNDLCFTNVYADSFVIRGDEVRQIAPGQTGTIADYNYKLPDDFTGCVIAWNSNNLDSKVGGNYNYLYRLFRKSNLKPFERDISTEIYQAGSTPCNGVKGFNCYFPLQSYGFQPTYGVGYQPYRVVVLSFELLHAPATVCGPKKSTNLVKNK

SEQ ID NO: 290 - DNA, 1278 bp, synthetic construct
  misc_feature 1..1278: note = Synthetic
  source 1..1278: mol_type = other DNA
aatatcacaaacttgtgcccatttggggaggtcttcaatgccactcggtttgcatcagtatatgcatggaatcgtaaacggatatcaaattgcgttgctgactattcagtcctctataatagtgctagtttcagtacatttaaatgctacggagtatctcctactaagttgaatgacctttgcttcacaaatgtctatgctgacagttttgttattaggggtgacgaggtgcggcagattgcacccgggcaaacaggaaccatcgctgactacaattacaaacttcctgatgacttcactggttgtgtgattgcttggaattccaacaatctggattccaaagtgggtgggaattacaattacttgtatagattgtttagaaaatctaacctcaagccattcgaacgggatataagcacagaaatctatcaggctgggagcacaccttgtaacggcgtaaaggggttcaattgctattttccacttcagtcatacggctttcaacccacctacggggtgggataccagccatatcgagtggtcgtactctctttcgagctgcttcatgcccccgcaaccgtgtgtggtcccaaaaaaagcaccaatctcgtcaagaataagggatcaggggggggcggatcaggcggtggaggcagcaacataactaatctttgtccattcggtgaagtctttaatgcaacccgttttgcttctgtgtatgcatggaacaggaaaagaatatccaattgcgttgccgactatagcgtcctttacaattctgcctcctttagcacatttaagtgttatggggtctcccccactaagctgaatgatctgtgtttcaccaacgtttatgcagactcctttgttatacggggggatgaagttcgacaaatagcacccgggcagacagggaccatcgctgactacaattacaagcttccagatgacttcactgggtgcgtaatcgcctggaacagtaacaacttggactctaaagtcggagggaattataattacctttatcgtctcttccgcaaaagtaacttgaagccttttgagagggacatttccacagagatatatcaagcaggttccacaccatgcaacggcgtcaagggatttaattgttatttccccctccaatcatacggctttcagccaacttacggcgttggctaccaaccatacagagtcgtagtgctttcctttgaactgctgcacgcccctgccactgtgtgtggcccaaaaaagagcaccaatttggtaaagaacaag

SEQ ID NO: 291 - protein, 666 aa, synthetic construct
  REGION 1..666: note = Synthetic
NITNLCPFGEVFNATRFASVYAWNRKRISNCVADYSVLYNSASFSTFKCYGVSPTKLNDLCFTNVYADSFVIRGDEVRQIAPGQTGTIADYNYKLPDDFTGCVIAWNSNNLDSKVGGNYNYLYRLFRKSNLKPFERDISTEIYQAGSTPCNGVKGFNCYFPLQSYGFQPTYGVGYQPYRVVVLSFELLHAPATVCGPKKSTNLVKNKGSGGGGSGGGGSNITNLCPFGEVFNATRFASVYAWNRKRISNCVADYSVLYNSASFSTFKCYGVSPTKLNDLCFTNVYADSFVIRGDEVRQIAPGQTGTIADYNYKLPDDFTGCVIAWNSNNLDSKVGGNYNYLYRLFRKSNLKPFERDISTEIYQAGSTPCNGVKGFNCYFPLQSYGFQPTYGVGYQPYRVVVLSFELLHAPATVCGPKKSTNLVKNKGSGGGGDGGGGSGDKTHTCPPCPAPELLGGPSVFLFPPKPKDTLMISRTPEVTCVVVDVSHEDPEVKFNWYVDGVEVHNAKTKPREEQYNSTYRVVSVLTVLHQDWLNGKEYKCKVSNKALPAPIEKTISKAKGQPREPQVYTLPPSREELTKNQVSLTCLVKGFYPSDIAVEWESNGQPENNYKTTPPVLDSDGSFFLYSKLTVDKSRWQQGNVFSCSVMHEALHNHYTQKSLSLSPGS

SEQ ID NO: 292 - DNA, 1998 bp, synthetic construct
  misc_feature 1..1998: note = Synthetic
  source 1..1998: mol_type = other DNA
aatatcacaaacttgtgcccatttggggaggtcttcaatgccactcggtttgcatcagtatatgcatggaatcgtaaacggatatcaaattgcgttgctgactattcagtcctctataatagtgctagtttcagtacatttaaatgctacggagtatctcctactaagttgaatgacctttgcttcacaaatgtctatgctgacagttttgttattaggggtgacgaggtgcggcagattgcacccgggcaaacaggaaccatcgctgactacaattacaaacttcctgatgacttcactggttgtgtgattgcttggaattccaacaatctggattccaaagtgggtgggaattacaattacttgtatagattgtttagaaaatctaacctcaagccattcgaacgggatataagcacagaaatctatcaggctgggagcacaccttgtaacggcgtaaaggggttcaattgctattttccacttcagtcatacggctttcaacccacctacggggtgggataccagccatatcgagtggtcgtactctctttcgagctgcttcatgcccccgcaaccgtgtgtggtcccaaaaaaagcaccaatctcgtcaagaataagggatcaggggggggcggatcaggcggtggaggcagcaacataactaatctttgtccattcggtgaagtctttaatgcaacccgttttgcttctgtgtatgcatggaacaggaaaagaatatccaattgcgttgccgactatagcgtcctttacaattctgcctcctttagcacatttaagtgttatggggtctcccccactaagctgaatgatctgtgtttcaccaacgtttatgcagactcctttgttatacggggggatgaagttcgacaaatagcacccgggcagacagggaccatcgctgactacaattacaagcttccagatgacttcactgggtgcgtaatcgcctggaacagtaacaacttggactctaaagtcggagggaattataattacctttatcgtctcttccgcaaaagtaacttgaagccttttgagagggacatttccacagagatatatcaagcaggttccacaccatgcaacggcgtcaagggatttaattgttatttccccctccaatcatacggctttcagccaacttacggcgttggctaccaaccatacagagtcgtagtgctttcctttgaactgctgcacgcccctgccactgtgtgtggcccaaaaaagagcaccaatttggtaaagaacaagggatccggcggcggcggtgacggtggtggcggctccggagacaagacccacacctgccccccttgtcctgcccctgagctgctgggcggaccctccgtgtttctgttcccccccaagcccaaggacaccctgatgatcagccggacccccgaggtcacctgcgtggtggtggacgtcagccacgaggacccagaggtcaagttcaattggtatgtggacggcgtggaggtgcacaacgccaagaccaagccccgggaggaacagtacaacagcacctaccgggtggtgtccgtgctgaccgtgctgcaccaggactggctgaacggcaaagaatacaagtgcaaggtgtccaacaaggccctgcctgcccccatcgagaaaaccatcagcaaggccaagggccagcccagagaaccccaggtgtacaccctgccccctagcagggaagagctgaccaagaaccaggtgtccctgacctgtctggtcaagggcttctaccccagcgatatcgccgtggagtgggagagcaacggccagcctgagaacaactacaagaccaccccccctgtgctggacagcgacggcagcttcttcctgtacagcaagctgaccgtggacaagagccggtggcagcagggcaacgtgtttagctgcagcgtgatgcacgaggccctgcacaaccactacacccagaagagcttaagcctgtcccctggcagt

SEQ ID NO: 293 - protein, 426 aa, synthetic construct
  REGION 1..426: note = Synthetic
NITNLCPFGEVFNATRFASVYAWNRKRISNCVADYSVLYNSASFSTFKCYGVSPTKLNDLCFTNVYADSFVIRGDEVRQIAPGQTGKIADYNYKLPDDFTGCVIAWNSNNLDSKVGGNYNYRYRLFRKSNLKPFERDISTEIYQAGSKPCNGVEGFNCYFPLQSYGFQPTNGVGYQPYRVVVLSFELLHAPATVCGPKKSTNLVKNKGSGGGGSGGGGSNITNLCPFGEVFNATRFASVYAWNRKRISNCVADYSVLYNSASFSTFKCYGVSPTKLNDLCFTNVYADSFVIRGDEVRQIAPGQTGKIADYNYKLPDDFTGCVIAWNSNNLDSKVGGNYNYRYRLFRKSNLKPFERDISTEIYQAGSKPCNGVEGFNCYFPLQSYGFQPTNGVGYQPYRVVVLSFELLHAPATVCGPKKSTNLVKNK

SEQ ID NO: 294 - DNA, 1278 bp, synthetic construct
  misc_feature 1..1278: note = Synthetic
  source 1..1278: mol_type = other DNA
aatatcacaaacttgtgcccatttggggaggtcttcaatgccactcggtttgcatcagtatatgcatggaatcgtaaacggatatcaaattgcgttgctgactattcagtcctctataatagtgctagtttcagtacatttaaatgctacggagtatctcctactaagttgaatgacctttgcttcacaaatgtctatgctgacagttttgttattaggggtgacgaggtgcggcagattgcacccgggcaaacaggaaagatcgctgactacaattacaaacttcctgatgacttcactggttgtgtgattgcttggaattccaacaatctggattccaaagtgggtgggaattacaattacagatatagattgtttagaaaatctaacctcaagccattcgaacgggatataagcacagaaatctatcaggctgggagcaaaccttgtaacggcgtagaggggttcaattgctattttccacttcagtcatacggctttcaacccaccaatggggtgggataccagccatatcgagtggtcgtactctctttcgagctgcttcatgcccccgcaaccgtgtgtggtcccaaaaaaagcaccaatctcgtcaagaataagggatcaggggggggcggatcaggcggtggaggcagcaacataactaatctttgtccattcggtgaagtctttaatgcaacccgttttgcttctgtgtatgcatggaacaggaaaagaatatccaattgcgttgccgactatagcgtcctttacaattctgcctcctttagcacatttaagtgttatggggtctcccccactaagctgaatgatctgtgtttcaccaacgtttatgcagactcctttgttatacggggggatgaagttcgacaaatagcacccgggcagacagggaagatcgctgactacaattacaagcttccagatgacttcactgggtgcgtaatcgcctggaacagtaacaacttggactctaaagtcggagggaattataattacagatatcgtctcttccgcaaaagtaacttgaagccttttgagagggacatttccacagagatatatcaagcaggttccaaaccatgcaacggcgtcgagggatttaattgttatttccccctccaatcatacggctttcagccaactaacggcgttggctaccaaccatacagagtcgtagtgctttcctttgaactgctgcacgcccctgccactgtgtgtggcccaaaaaagagcaccaatttggtaaagaacaag

SEQ ID NO: 295 - protein, 666 aa, synthetic construct
  REGION 1..666: note = Synthetic
NITNLCPFGEVFNATRFASVYAWNRKRISNCVADYSVLYNSASFSTFKCYGVSPTKLNDLCFTNVYADSFVIRGDEVRQIAPGQTGKIADYNYKLPDDFTGCVIAWNSNNLDSKVGGNYNYRYRLFRKSNLKPFERDISTEIYQAGSKPCNGVEGFNCYFPLQSYGFQPTNGVGYQPYRVVVLSFELLHAPATVCGPKKSTNLVKNKGSGGGGSGGGGSNITNLCPFGEVFNATRFASVYAWNRKRISNCVADYSVLYNSASFSTFKCYGVSPTKLNDLCFTNVYADSFVIRGDEVRQIAPGQTGKIADYNYKLPDDFTGCVIAWNSNNLDSKVGGNYNYRYRLFRKSNLKPFERDISTEIYQAGSKPCNGVEGFNCYFPLQSYGFQPTNGVGYQPYRVVVLSFELLHAPATVCGPKKSTNLVKNKGSGGGGDGGGGSGDKTHTCPPCPAPELLGGPSVFLFPPKPKDTLMISRTPEVTCVVVDVSHEDPEVKFNWYVDGVEVHNAKTKPREEQYNSTYRVVSVLTVLHQDWLNGKEYKCKVSNKALPAPIEKTISKAKGQPREPQVYTLPPSREELTKNQVSLTCLVKGFYPSDIAVEWESNGQPENNYKTTPPVLDSDGSFFLYSKLTVDKSRWQQGNVFSCSVMHEALHNHYTQKSLSLSPGS

SEQ ID NO: 296 - DNA, 1998 bp, synthetic construct
  misc_feature 1..1998: note = Synthetic
  source 1..1998: mol_type = other DNA
aatatcacaaacttgtgcccatttggggaggtcttcaatgccactcggtttgcatcagtatatgcatggaatcgtaaacggatatcaaattgcgttgctgactattcagtcctctataatagtgctagtttcagtacatttaaatgctacggagtatctcctactaagttgaatgacctttgcttcacaaatgtctatgctgacagttttgttattaggggtgacgaggtgcggcagattgcacccgggcaaacaggaaagatcgctgactacaattacaaacttcctgatgacttcactggttgtgtgattgcttggaattccaacaatctggattccaaagtgggtgggaattacaattacagatatagattgtttagaaaatctaacctcaagccattcgaacgggatataagcacagaaatctatcaggctgggagcaaaccttgtaacggcgtagaggggttcaattgctattttccacttcagtcatacggctttcaacccaccaatggggtgggataccagccatatcgagtggtcgtactctctttcgagctgcttcatgcccccgcaaccgtgtgtggtcccaaaaaaagcaccaatctcgtcaagaataagggatcaggggggggcggatcaggcggtggaggcagcaacataactaatctttgtccattcggtgaagtctttaatgcaacccgttttgcttctgtgtatgcatggaacaggaaaagaatatccaattgcgttgccgactatagcgtcctttacaattctgcctcctttagcacatttaagtgttatggggtctcccccactaagctgaatgatctgtgtttcaccaacgtttatgcagactcctttgttatacggggggatgaagttcgacaaatagcacccgggcagacagggaagatcgctgactacaattacaagcttccagatgacttcactgggtgcgtaatcgcctggaacagtaacaacttggactctaaagtcggagggaattataattacagatatcgtctcttccgcaaaagtaacttgaagccttttgagagggacatttccacagagatatatcaagcaggttccaaaccatgcaacggcgtcgagggatttaattgttatttccccctccaatcatacggctttcagccaactaacggcgttggctaccaaccatacagagtcgtagtgctttcctttgaactgctgcacgcccctgccactgtgtgtggcccaaaaaagagcaccaatttggtaaagaacaagggatccggcggcggcggtgacggtggtggcggctccggagacaagacccacacctgccccccttgtcctgcccctgagctgctgggcggaccctccgtgtttctgttcccccccaagcccaaggacaccctgatgatcagccggacccccgaggtcacctgcgtggtggtggacgtcagccacgaggacccagaggtcaagttcaattggtatgtggacggcgtggaggtgcacaacgccaagaccaagccccgggaggaacagtacaacagcacctaccgggtggtgtccgtgctgaccgtgctgcaccaggactggctgaacggcaaagaatacaagtgcaaggtgtccaacaaggccctgcctgcccccatcgagaaaaccatcagcaaggccaagggccagcccagagaaccccaggtgtacaccctgccccctagcagggaagagctgaccaagaaccaggtgtccctgacctgtctggtcaagggcttctaccccagcgatatcgccgtggagtgggagagcaacggccagcctgagaacaactacaagaccaccccccctgtgctggacagcgacggcagcttcttcctgtacagcaagctgaccgtggacaagagccggtggcagcagggcaacgtgtttagctgcagcgtgatgcacgaggccctgcacaaccactacacccagaagagcttaagcctgtcccctggcagt

SEQ ID NO: 297 - protein, 426 aa, synthetic construct
  REGION 1..426: note = Synthetic
NITNLCPFGEVFNATRFASVYAWNRKRISNCVADYSVLYNSASFSTFKCYGVSPTKLNDLCFTNVYADSFVIRGDEVRQIAPGQTGNIADYNYKLPDDFTGCVIAWNSNNLDSKVGGNYNYRYRLFRKSNLKPFERDISTEIYQAGSKPCNGVEGFNCYFPLQSYGFQPTNGVGYQPYRVVVLSFELLHAPATVCGPKKSTNLVKNKGSGGGGSGGGGSNITNLCPFGEVFNATRFASVYAWNRKRISNCVADYSVLYNSASFSTFKCYGVSPTKLNDLCFTNVYADSFVIRGDEVRQIAPGQTGNIADYNYKLPDDFTGCVIAWNSNNLDSKVGGNYNYRYRLFRKSNLKPFERDISTEIYQAGSKPCNGVEGFNCYFPLQSYGFQPTNGVGYQPYRVVVLSFELLHAPATVCGPKKSTNLVKNK

SEQ ID NO: 298 - DNA, 1278 bp, synthetic construct
  misc_feature 1..1278: note = Synthetic
  source 1..1278: mol_type = other DNA
aatatcacaaacttgtgcccatttggggaggtcttcaatgccactcggtttgcatcagtatatgcatggaatcgtaaacggatatcaaattgcgttgctgactattcagtcctctataatagtgctagtttcagtacatttaaatgctacggagtatctcctactaagttgaatgacctttgcttcacaaatgtctatgctgacagttttgttattaggggtgacgaggtgcggcagattgcacccgggcaaacaggaaacatcgctgactacaattacaaacttcctgatgacttcactggttgtgtgattgcttggaattccaacaatctggattccaaagtgggtgggaattacaattacagatatagattgtttagaaaatctaacctcaagccattcgaacgggatataagcacagaaatctatcaggctgggagcaaaccttgtaacggcgtagaggggttcaattgctattttccacttcagtcatacggctttcaacccaccaatggggtgggataccagccatatcgagtggtcgtactctctttcgagctgcttcatgcccccgcaaccgtgtgtggtcccaaaaaaagcaccaatctcgtcaagaataagggatcaggggggggcggatcaggcggtggaggcagcaacataactaatctttgtccattcggtgaagtctttaatgcaacccgttttgcttctgtgtatgcatggaacaggaaaagaatatccaattgcgttgccgactatagcgtcctttacaattctgcctcctttagcacatttaagtgttatggggtctcccccactaagctgaatgatctgtgtttcaccaacgtttatgcagactcctttgttatacggggggatgaagttcgacaaatagcacccgggcagacagggaacatcgctgactacaattacaagcttccagatgacttcactgggtgcgtaatcgcctggaacagtaacaacttggactctaaagtcggagggaattataattacagatatcgtctcttccgcaaaagtaacttgaagccttttgagagggacatttccacagagatatatcaagcaggttccaaaccatgcaacggcgtcgagggatttaattgttatttccccctccaatcatacggctttcagccaactaacggcgttggctaccaaccatacagagtcgtagtgctttcctttgaactgctgcacgcccctgccactgtgtgtggcccaaaaaagagcaccaatttggtaaagaacaag

SEQ ID NO: 299 - protein, 666 aa, synthetic construct
  REGION 1..666: note = Synthetic
NITNLCPFGEVFNATRFASVYAWNRKRISNCVADYSVLYNSASFSTFKCYGVSPTKLNDLCFTNVYADSFVIRGDEVRQIAPGQTGNIADYNYKLPDDFTGCVIAWNSNNLDSKVGGNYNYRYRLFRKSNLKPFERDISTEIYQAGSKPCNGVEGFNCYFPLQSYGFQPTNGVGYQPYRVVVLSFELLHAPATVCGPKKSTNLVKNKGSGGGGSGGGGSNITNLCPFGEVFNATRFASVYAWNRKRISNCVADYSVLYNSASFSTFKCYGVSPTKLNDLCFTNVYADSFVIRGDEVRQIAPGQTGNIADYNYKLPDDFTGCVIAWNSNNLDSKVGGNYNYRYRLFRKSNLKPFERDISTEIYQAGSKPCNGVEGFNCYFPLQSYGFQPTNGVGYQPYRVVVLSFELLHAPATVCGPKKSTNLVKNKGSGGGGDGGGGSGDKTHTCPPCPAPELLGGPSVFLFPPKPKDTLMISRTPEVTCVVVDVSHEDPEVKFNWYVDGVEVHNAKTKPREEQYNSTYRVVSVLTVLHQDWLNGKEYKCKVSNKALPAPIEKTISKAKGQPREPQVYTLPPSREELTKNQVSLTCLVKGFYPSDIAVEWESNGQPENNYKTTPPVLDSDGSFFLYSKLTVDKSRWQQGNVFSCSVMHEALHNHYTQKSLSLSPGS

SEQ ID NO: 300 - DNA, 1998 bp, synthetic construct
  misc_feature 1..1998: note = Synthetic
  source 1..1998: mol_type = other DNA
aatatcacaaacttgtgcccatttggggaggtcttcaatgccactcggtttgcatcagtatatgcatggaatcgtaaacggatatcaaattgcgttgctgactattcagtcctctataatagtgctagtttcagtacatttaaatgctacggagtatctcctactaagttgaatgacctttgcttcacaaatgtctatgctgacagttttgttattaggggtgacgaggtgcggcagattgcacccgggcaaacaggaaacatcgctgactacaattacaaacttcctgatgacttcactggttgtgtgattgcttggaattccaacaatctggattccaaagtgggtgggaattacaattacagatatagattgtttagaaaatctaacctcaagccattcgaacgggatataagcacagaaatctatcaggctgggagcaaaccttgtaacggcgtagaggggttcaattgctattttccacttcagtcatacggctttcaacccaccaatggggtgggataccagccatatcgagtggtcgtactctctttcgagctgcttcatgcccccgcaaccgtgtgtggtcccaaaaaaagcaccaatctcgtcaagaataagggatcaggggggggcggatcaggcggtggaggcagcaacataactaatctttgtccattcggtgaagtctttaatgcaacccgttttgcttctgtgtatgcatggaacaggaaaagaatatccaattgcgttgccgactatagcgtcctttacaattctgcctcctttagcacatttaagtgttatggggtctcccccactaagctgaatgatctgtgtttcaccaacgtttatgcagactcctttgttatacggggggatgaagttcgacaaatagcacccgggcagacagggaacatcgctgactacaattacaagcttccagatgacttcactgggtgcgtaatcgcctggaacagtaacaacttggactctaaagtcggagggaattataattacagatatcgtctcttccgcaaaagtaacttgaagccttttgagagggacatttccacagagatatatcaagcaggttccaaaccatgcaacggcgtcgagggatttaattgttatttccccctccaatcatacggctttcagccaactaacggcgttggctaccaaccatacagagtcgtagtgctttcctttgaactgctgcacgcccctgccactgtgtgtggcccaaaaaagagcaccaatttggtaaagaacaagggatccggcggcggcggtgacggtggtggcggctccggagacaagacccacacctgccccccttgtcctgcccctgagctgctgggcggaccctccgtgtttctgttcccccccaagcccaaggacaccctgatgatcagccggacccccgaggtcacctgcgtggtggtggacgtcagccacgaggacccagaggtcaagttcaattggtatgtggacggcgtggaggtgcacaacgccaagaccaagccccgggaggaacagtacaacagcacctaccgggtggtgtccgtgctgaccgtgctgcaccaggactggctgaacggcaaagaatacaagtgcaaggtgtccaacaaggccctgcctgcccccatcgagaaaaccatcagcaaggccaagggccagcccagagaaccccaggtgtacaccctgccccctagcagggaagagctgaccaagaaccaggtgtccctgacctgtctggtcaagggcttctaccccagcgatatcgccgtggagtgggagagcaacggccagcctgagaacaactacaagaccaccccccctgtgctggacagcgacggcagcttcttcctgtacagcaagctgaccgtggacaagagccggtggcagcagggcaacgtgtttagctgcagcgtgatgcacgaggccctgcacaaccactacacccagaagagcttaagcctgtcccctggcagt

SEQ ID NO: 301 - protein, 426 aa, synthetic construct
  REGION 1..426: note = Synthetic
NITNLCPFGEVFNATKFASVYAWNRKRISNCVADYSVLYNSASFSTFKCYGVSPTKLNDLCFTNVYADSFVIRGDEVRQIAPGQTGKIADYNYKLPDDFTGCVIAWNSNNLDSKVGGNYNYLYRLFRKSNLKPFERDISTEIYQAGSTPCNGVKGFNCYFPLQSYGFQPTYGVGYQPYRVVVLSFELLHAPATVCGPKKSTNLVKNKGSGGGGSGGGGSNITNLCPFGEVFNATKFASVYAWNRKRISNCVADYSVLYNSASFSTFKCYGVSPTKLNDLCFTNVYADSFVIRGDEVRQIAPGQTGKIADYNYKLPDDFTGCVIAWNSNNLDSKVGGNYNYLYRLFRKSNLKPFERDISTEIYQAGSTPCNGVKGFNCYFPLQSYGFQPTYGVGYQPYRVVVLSFELLHAPATVCGPKKSTNLVKNK

SEQ ID NO: 302 - DNA, 1278 bp, synthetic construct
  misc_feature 1..1278: note = Synthetic
  source 1..1278: mol_type = other DNA
aatatcacaaacttgtgcccatttggggaggtcttcaatgccactaaatttgcatcagtatatgcatggaatcgtaaacggatatcaaattgcgttgctgactattcagtcctctataatagtgctagtttcagtacatttaaatgctacggagtatctcctactaagttgaatgacctttgcttcacaaatgtctatgctgacagttttgttattaggggtgacgaggtgcggcagattgcacccgggcaaacaggaaagatcgctgactacaattacaaacttcctgatgacttcactggttgtgtgattgcttggaattccaacaatctggattccaaagtgggtgggaattacaattacttgtatagattgtttagaaaatctaacctcaagccattcgaacgggatataagcacagaaatctatcaggctgggagcacaccttgtaacggcgtaaaggggttcaattgctattttccacttcagtcatacggctttcaacccacctacggggtgggataccagccatatcgagtggtcgtactctctttcgagctgcttcatgcccccgcaaccgtgtgtggtcccaaaaaaagcaccaatctcgtcaagaataagggatcaggggggggcggatcaggcggtggaggcagcaacataactaatctttgtccattcggtgaagtctttaatgcaaccaaatttgcttctgtgtatgcatggaacaggaaaagaatatccaattgcgttgccgactatagcgtcctttacaattctgcctcctttagcacatttaagtgttatggggtctcccccactaagctgaatgatctgtgtttcaccaacgtttatgcagactcctttgttatacggggggatgaagttcgacaaatagcacccgggcagacagggaagatcgctgactacaattacaagcttccagatgacttcactgggtgcgtaatcgcctggaacagtaacaacttggactctaaagtcggagggaattataattacctttatcgtctcttccgcaaaagtaacttgaagccttttgagagggacatttccacagagatatatcaagcaggttccacaccatgcaacggcgtcaagggatttaattgttatttccccctccaatcatacggctttcagccaacttacggcgttggctaccaaccatacagagtcgtagtgctttcctttgaactgctgcacgcccctgccactgtgtgtggcccaaaaaagagcaccaatttggtaaagaacaag

SEQ ID NO: 303 - protein, 666 aa, synthetic construct
  REGION 1..666: note = Synthetic
NITNLCPFGEVFNATKFASVYAWNRKRISNCVADYSVLYNSASFSTFKCYGVSPTKLNDLCFTNVYADSFVIRGDEVRQIAPGQTGKIADYNYKLPDDFTGCVIAWNSNNLDSKVGGNYNYLYRLFRKSNLKPFERDISTEIYQAGSTPCNGVKGFNCYFPLQSYGFQPTYGVGYQPYRVVVLSFELLHAPATVCGPKKSTNLVKNKGSGGGGSGGGGSNITNLCPFGEVFNATKFASVYAWNRKRISNCVADYSVLYNSASFSTFKCYGVSPTKLNDLCFTNVYADSFVIRGDEVRQIAPGQTGKIADYNYKLPDDFTGCVIAWNSNNLDSKVGGNYNYLYRLFRKSNLKPFERDISTEIYQAGSTPCNGVKGFNCYFPLQSYGFQPTYGVGYQPYRVVVLSFELLHAPATVCGPKKSTNLVKNKGSGGGGDGGGGSGDKTHTCPPCPAPELLGGPSVFLFPPKPKDTLMISRTPEVTCVVVDVSHEDPEVKFNWYVDGVEVHNAKTKPREEQYNSTYRVVSVLTVLHQDWLNGKEYKCKVSNKALPAPIEKTISKAKGQPREPQVYTLPPSREELTKNQVSLTCLVKGFYPSDIAVEWESNGQPENNYKTTPPVLDSDGSFFLYSKLTVDKSRWQQGNVFSCSVMHEALHNHYTQKSLSLSPGS

SEQ ID NO: 304 - DNA, 1998 bp, synthetic construct
  misc_feature 1..1998: note = Synthetic
  source 1..1998: mol_type = other DNA
aatatcacaaacttgtgcccatttggggaggtcttcaatgccactaaatttgcatcagtatatgcatggaatcgtaaacggatatcaaattgcgttgctgactattcagtcctctataatagtgctagtttcagtacatttaaatgctacggagtatctcctactaagttgaatgacctttgcttcacaaatgtctatgctgacagttttgttattaggggtgacgaggtgcggcagattgcacccgggcaaacaggaaagatcgctgactacaattacaaacttcctgatgacttcactggttgtgtgattgcttggaattccaacaatctggattccaaagtgggtgggaattacaattacttgtatagattgtttagaaaatctaacctcaagccattcgaacgggatataagcacagaaatctatcaggctgggagcacaccttgtaacggcgtaaaggggttcaattgctattttccacttcagtcatacggctttcaacccacctacggggtgggataccagccatatcgagtggtcgtactctctttcgagctgcttcatgcccccgcaaccgtgtgtggtcccaaaaaaagcaccaatctcgtcaagaataagggatcaggggggggcggatcaggcggtggaggcagcaacataactaatctttgtccattcggtgaagtctttaatgcaaccaaatttgcttctgtgtatgcatggaacaggaaaagaatatccaattgcgttgccgactatagcgtcctttacaattctgcctcctttagcacatttaagtgttatggggtctcccccactaagctgaatgatctgtgtttcaccaacgtttatgcagactcctttgttatacggggggatgaagttcgacaaatagcacccgggcagacagggaagatcgctgactacaattacaagcttccagatgacttcactgggtgcgtaatcgcctggaacagtaacaacttggactctaaagtcggagggaattataattacctttatcgtctcttccgcaaaagtaacttgaagccttttgagagggacatttccacagagatatatcaagcaggttccacaccatgcaacggcgtcaagggatttaattgttatttccccctccaatcatacggctttcagccaacttacggcgttggctaccaaccatacagagtcgtagtgctttcctttgaactgctgcacgcccctgccactgtgtgtggcccaaaaaagagcaccaatttggtaaagaacaagggatccggcggcggcggtgacggtggtggcggctccggagacaagacccacacctgccccccttgtcctgcccctgagctgctgggcggaccctccgtgtttctgttcccccccaagcccaaggacaccctgatgatcagccggacccccgaggtcacctgcgtggtggtggacgtcagccacgaggacccagaggtcaagttcaattggtatgtggacggcgtggaggtgcacaacgccaagaccaagccccgggaggaacagtacaacagcacctaccgggtggtgtccgtgctgaccgtgctgcaccaggactggctgaacggcaaagaatacaagtgcaaggtgtccaacaaggccctgcctgcccccatcgagaaaaccatcagcaaggccaagggccagcccagagaaccccaggtgtacaccctgccccctagcagggaagagctgaccaagaaccaggtgtccctgacctgtctggtcaagggcttctaccccagcgatatcgccgtggagtgggagagcaacggccagcctgagaacaactacaagaccaccccccctgtgctggacagcgacggcagcttcttcctgtacagcaagctgaccgtggacaagagccggtggcagcagggcaacgtgtttagctgcagcgtgatgcacgaggccctgcacaaccactacacccagaagagcttaagcctgtcccctggcagt

SEQ ID NO: 305 - protein, 426 aa, synthetic construct
  REGION 1..426: note = Synthetic
NITNLCPFGEVFNATKFASVYAWNRKRISNCVADYSVLYNSASFSTFKCYGVSPTKLNDLCFTNVYADSFVIRGDEVRQIAPGQTGKIADYNYKLPDDFTGCVIAWNSNNLDSKVGGNYNYLYRLFRKSNLKPFERDISTEIYQAGSRPCNGVKGFNCYFPLQSYGFQPTNGVGYQPYRVVVLSFELLHAPATVCGPKKSTNLVKNKGSGGGGSGGGGSNITNLCPFGEVFNATKFASVYAWNRKRISNCVADYSVLYNSASFSTFKCYGVSPTKLNDLCFTNVYADSFVIRGDEVRQIAPGQTGKIADYNYKLPDDFTGCVIAWNSNNLDSKVGGNYNYLYRLFRKSNLKPFERDISTEIYQAGSRPCNGVKGFNCYFPLQSYGFQPTNGVGYQPYRVVVLSFELLHAPATVCGPKKSTNLVKNK

SEQ ID NO: 306 - DNA, 1278 bp, synthetic construct
  misc_feature 1..1278: note = Synthetic
  source 1..1278: mol_type = other DNA
aatatcacaaacttgtgcccatttggggaggtcttcaatgccactaaatttgcatcagtatatgcatggaatcgtaaacggatatcaaattgcgttgctgactattcagtcctctataatagtgctagtttcagtacatttaaatgctacggagtatctcctactaagttgaatgacctttgcttcacaaatgtctatgctgacagttttgttattaggggtgacgaggtgcggcagattgcacccgggcaaacaggaaagatcgctgactacaattacaaacttcctgatgacttcactggttgtgtgattgcttggaattccaacaatctggattccaaagtgggtgggaattacaattacttgtatagattgtttagaaaatctaacctcaagccattcgaacgggatataagcacagaaatctatcaggctgggagcagaccttgtaacggcgtaaaggggttcaattgctattttccacttcagtcatacggctttcaacccaccaatggggtgggataccagccatatcgagtggtcgtactctctttcgagctgcttcatgcccccgcaaccgtgtgtggtcccaaaaaaagcaccaatctcgtcaagaataagggatcaggggggggcggatcaggcggtggaggcagcaacataactaatctttgtccattcggtgaagtctttaatgcaaccaaatttgcttctgtgtatgcatggaacaggaaaagaatatccaattgcgttgccgactatagcgtcctttacaattctgcctcctttagcacatttaagtgttatggggtctcccccactaagctgaatgatctgtgtttcaccaacgtttatgcagactcctttgttatacggggggatgaagttcgacaaatagcacccgggcagacagggaagatcgctgactacaattacaagcttccagatgacttcactgggtgcgtaatcgcctggaacagtaacaacttggactctaaagtcggagggaattataattacctttatcgtctcttccgcaaaagtaacttgaagccttttgagagggacatttccacagagatatatcaagcaggttccagaccatgcaacggcgtcaagggatttaattgttatttccccctccaatcatacggctttcagccaactaacggcgttggctaccaaccatacagagtcgtagtgctttcctttgaactgctgcacgcccctgccactgtgtgtggcccaaaaaagagcaccaatttggtaaagaacaag

SEQ ID NO: 307 - protein, 666 aa, synthetic construct
  REGION 1..666: note = Synthetic
NITNLCPFGEVFNATKFASVYAWNRKRISNCVADYSVLYNSASFSTFKCYGVSPTKLNDLCFTNVYADSFVIRGDEVRQIAPGQTGKIADYNYKLPDDFTGCVIAWNSNNLDSKVGGNYNYLYRLFRKSNLKPFERDISTEIYQAGSRPCNGVKGFNCYFPLQSYGFQPTNGVGYQPYRVVVLSFELLHAPATVCGPKKSTNLVKNKGSGGGGSGGGGSNITNLCPFGEVFNATKFASVYAWNRKRISNCVADYSVLYNSASFSTFKCYGVSPTKLNDLCFTNVYADSFVIRGDEVRQIAPGQTGKIADYNYKLPDDFTGCVIAWNSNNLDSKVGGNYNYLYRLFRKSNLKPFERDISTEIYQAGSRPCNGVKGFNCYFPLQSYGFQPTNGVGYQPYRVVVLSFELLHAPATVCGPKKSTNLVKNKGSGGGGDGGGGSGDKTHTCPPCPAPELLGGPSVFLFPPKPKDTLMISRTPEVTCVVVDVSHEDPEVKFNWYVDGVEVHNAKTKPREEQYNSTYRVVSVLTVLHQDWLNGKEYKCKVSNKALPAPIEKTISKAKGQPREPQVYTLPPSREELTKNQVSLTCLVKGFYPSDIAVEWESNGQPENNYKTTPPVLDSDGSFFLYSKLTVDKSRWQQGNVFSCSVMHEALHNHYTQKSLSLSPGS

SEQ ID NO: 308 - DNA, 1998 bp, synthetic construct
  misc_feature 1..1998: note = Synthetic
  source 1..1998: mol_type = other DNA
aatatcacaaacttgtgcccatttggggaggtcttcaatgccactaaatttgcatcagtatatgcatggaatcgtaaacggatatcaaattgcgttgctgactattcagtcctctataatagtgctagtttcagtacatttaaatgctacggagtatctcctactaagttgaatgacctttgcttcacaaatgtctatgctgacagttttgttattaggggtgacgaggtgcggcagattgcacccgggcaaacaggaaagatcgctgactacaattacaaacttcctgatgacttcactggttgtgtgattgcttggaattccaacaatctggattccaaagtgggtgggaattacaattacttgtatagattgtttagaaaatctaacctcaagccattcgaacgggatataagcacagaaatctatcaggctgggagcagaccttgtaacggcgtaaaggggttcaattgctattttccacttcagtcatacggctttcaacccaccaatggggtgggataccagccatatcgagtggtcgtactctctttcgagctgcttcatgcccccgcaaccgtgtgtggtcccaaaaaaagcaccaatctcgtcaagaataagggatcaggggggggcggatcaggcggtggaggcagcaacataactaatctttgtccattcggtgaagtctttaatgcaaccaaatttgcttctgtgtatgcatggaacaggaaaagaatatccaattgcgttgccgactatagcgtcctttacaattctgcctcctttagcacatttaagtgttatggggtctcccccactaagctgaatgatctgtgtttcaccaacgtttatgcagactcctttgttatacggggggatgaagttcgacaaatagcacccgggcagacagggaagatcgctgactacaattacaagcttccagatgacttcactgggtgcgtaatcgcctggaacagtaacaacttggactctaaagtcggagggaattataattacctttatcgtctcttccgcaaaagtaacttgaagccttttgagagggacatttccacagagatatatcaagcaggttccagaccatgcaacggcgtcaagggatttaattgttatttccccctccaatcatacggctttcagccaactaacggcgttggctaccaaccatacagagtcgtagtgctttcctttgaactgctgcacgcccctgccactgtgtgtggcccaaaaaagagcaccaatttggtaaagaacaagggatccggcggcggcggtgacggtggtggcggctccggagacaagacccacacctgccccccttgtcctgcccctgagctgctgggcggaccctccgtgtttctgttcccccccaagcccaaggacaccctgatgatcagccggacccccgaggtcacctgcgtggtggtggacgtcagccacgaggacccagaggtcaagttcaattggtatgtggacggcgtggaggtgcacaacgccaagaccaagccccgggaggaacagtacaacagcacctaccgggtggtgtccgtgctgaccgtgctgcaccaggactggctgaacggcaaagaatacaagtgcaaggtgtccaacaaggccctgcctgcccccatcgagaaaaccatcagcaaggccaagggccagcccagagaaccccaggtgtacaccctgccccctagcagggaagagctgaccaagaaccaggtgtccctgacctgtctggtcaagggcttctaccccagcgatatcgccgtggagtgggagagcaacggccagcctgagaacaactacaagaccaccccccctgtgctggacagcgacggcagcttcttcctgtacagcaagctgaccgtggacaagagccggtggcagcagggcaacgtgtttagctgcagcgtgatgcacgaggccctgcacaaccactacacccagaagagcttaagcctgtcccctggcagt

SEQ ID NO: 309 - protein, 426 aa, synthetic construct
  REGION 1..426: note = Synthetic
NITNLCPFGEVFNATKFASVYAWNRKRISNCVADYSVLYNSASFSTFKCYGVSPTKLNDLCFTNVYADSFVIRGDEVRQIAPGQTGNIADYNYKLPDDFTGCVIAWNSNNLDSKVGGNYNYRYRLFRKSNLKPFERDISTEIYQAGSKPCNGVKGFNCYFPLQSYGFQPTYGVGYQPYRVVVLSFELLHAPATVCGPKKSTNLVKNKGSGGGGSGGGGSNITNLCPFGEVFNATKFASVYAWNRKRISNCVADYSVLYNSASFSTFKCYGVSPTKLNDLCFTNVYADSFVIRGDEVRQIAPGQTGNIADYNYKLPDDFTGCVIAWNSNNLDSKVGGNYNYRYRLFRKSNLKPFERDISTEIYQAGSKPCNGVKGFNCYFPLQSYGFQPTYGVGYQPYRVVVLSFELLHAPATVCGPKKSTNLVKNK

SEQ ID NO: 310 - DNA, 1278 bp, synthetic construct
  misc_feature 1..1278: note = Synthetic
  source 1..1278: mol_type = other DNA
aatatcacaaacttgtgcccatttggggaggtcttcaatgccactaaatttgcatcagtatatgcatggaatcgtaaacggatatcaaattgcgttgctgactattcagtcctctataatagtgctagtttcagtacatttaaatgctacggagtatctcctactaagttgaatgacctttgcttcacaaatgtctatgctgacagttttgttattaggggtgacgaggtgcggcagattgcacccgggcaaacaggaaacatcgctgactacaattacaaacttcctgatgacttcactggttgtgtgattgcttggaattccaacaatctggattccaaagtgggtgggaattacaattacagatatagattgtttagaaaatctaacctcaagccattcgaacgggatataagcacagaaatctatcaggctgggagcaaaccttgtaacggcgtaaaggggttcaattgctattttccacttcagtcatacggctttcaacccacctacggggtgggataccagccatatcgagtggtcgtactctctttcgagctgcttcatgcccccgcaaccgtgtgtggtcccaaaaaaagcaccaatctcgtcaagaataagggatcaggggggggcggatcaggcggtggaggcagcaacataactaatctttgtccattcggtgaagtctttaatgcaaccaaatttgcttctgtgtatgcatggaacaggaaaagaatatccaattgcgttgccgactatagcgtcctttacaattctgcctcctttagcacatttaagtgttatggggtctcccccactaagctgaatgatctgtgtttcaccaacgtttatgcagactcctttgttatacggggggatgaagttcgacaaatagcacccgggcagacagggaacatcgctgactacaattacaagcttccagatgacttcactgggtgcgtaatcgcctggaacagtaacaacttggactctaaagtcggagggaattataattacagatatcgtctcttccgcaaaagtaacttgaagccttttgagagggacatttccacagagatatatcaagcaggttccaaaccatgcaacggcgtcaagggatttaattgttatttccccctccaatcatacggctttcagccaacttacggcgttggctaccaaccatacagagtcgtagtgctttcctttgaactgctgcacgcccctgccactgtgtgtggcccaaaaaagagcaccaatttggtaaagaacaag

SEQ ID NO: 311 - protein, 666 aa, synthetic construct
  REGION 1..666: note = Synthetic
NITNLCPFGEVFNATKFASVYAWNRKRISNCVADYSVLYNSASFSTFKCYGVSPTKLNDLCFTNVYADSFVIRGDEVRQIAPGQTGNIADYNYKLPDDFTGCVIAWNSNNLDSKVGGNYNYRYRLFRKSNLKPFERDISTEIYQAGSKPCNGVKGFNCYFPLQSYGFQPTYGVGYQPYRVVVLSFELLHAPATVCGPKKSTNLVKNKGSGGGGSGGGGSNITNLCPFGEVFNATKFASVYAWNRKRISNCVADYSVLYNSASFSTFKCYGVSPTKLNDLCFTNVYADSFVIRGDEVRQIAPGQTGNIADYNYKLPDDFTGCVIAWNSNNLDSKVGGNYNYRYRLFRKSNLKPFERDISTEIYQAGSKPCNGVKGFNCYFPLQSYGFQPTYGVGYQPYRVVVLSFELLHAPATVCGPKKSTNLVKNKGSGGGGDGGGGSGDKTHTCPPCPAPELLGGPSVFLFPPKPKDTLMISRTPEVTCVVVDVSHEDPEVKFNWYVDGVEVHNAKTKPREEQYNSTYRVVSVLTVLHQDWLNGKEYKCKVSNKALPAPIEKTISKAKGQPREPQVYTLPPSREELTKNQVSLTCLVKGFYPSDIAVEWESNGQPENNYKTTPPVLDSDGSFFLYSKLTVDKSRWQQGNVFSCSVMHEALHNHYTQKSLSLSPGS

SEQ ID NO: 312 - DNA, 1998 bp, synthetic construct
  misc_feature 1..1998: note = Synthetic
  source 1..1998: mol_type = other DNA
aatatcacaaacttgtgcccatttggggaggtcttcaatgccactaaatttgcatcagtatatgcatggaatcgtaaacggatatcaaattgcgttgctgactattcagtcctctataatagtgctagtttcagtacatttaaatgctacggagtatctcctactaagttgaatgacctttgcttcacaaatgtctatgctgacagttttgttattaggggtgacgaggtgcggcagattgcacccgggcaaacaggaaacatcgctgactacaattacaaacttcctgatgacttcactggttgtgtgattgcttggaattccaacaatctggattccaaagtgggtgggaattacaattacagatatagattgtttagaaaatctaacctcaagccattcgaacgggatataagcacagaaatctatcaggctgggagcaaaccttgtaacggcgtaaaggggttcaattgctattttccacttcagtcatacggctttcaacccacctacggggtgggataccagccatatcgagtggtcgtactctctttcgagctgcttcatgcccccgcaaccgtgtgtggtcccaaaaaaagcaccaatctcgtcaagaataagggatcaggggggggcggatcaggcggtggaggcagcaacataactaatctttgtccattcggtgaagtctttaatgcaaccaaatttgcttctgtgtatgcatggaacaggaaaagaatatccaattgcgttgccgactatagcgtcctttacaattctgcctcctttagcacatttaagtgttatggggtctcccccactaagctgaatgatctgtgtttcaccaacgtttatgcagactcctttgttatacggggggatgaagttcgacaaatagcacccgggcagacagggaacatcgctgactacaattacaagcttccagatgacttcactgggtgcgtaatcgcctggaacagtaacaacttggactctaaagtcggagggaattataattacagatatcgtctcttccgcaaaagtaacttgaagccttttgagagggacatttccacagagatatatcaagcaggttccaaaccatgcaacggcgtcaagggatttaattgttatttccccctccaatcatacggctttcagccaacttacggcgttggctaccaaccatacagagtcgtagtgctttcctttgaactgctgcacgcccctgccactgtgtgtggcccaaaaaagagcaccaatttggtaaagaacaagggatccggcggcggcggtgacggtggtggcggctccggagacaagacccacacctgccccccttgtcctgcccctgagctgctgggcggaccctccgtgtttctgttcccccccaagcccaaggacaccctgatgatcagccggacccccgaggtcacctgcgtggtggtggacgtcagccacgaggacccagaggtcaagttcaattggtatgtggacggcgtggaggtgcacaacgccaagaccaagccccgggaggaacagtacaacagcacctaccgggtggtgtccgtgctgaccgtgctgcaccaggactggctgaacggcaaagaatacaagtgcaaggtgtccaacaaggccctgcctgcccccatcgagaaaaccatcagcaaggccaagggccagcccagagaaccccaggtgtacaccctgccccctagcagggaagagctgaccaagaaccaggtgtccctgacctgtctggtcaagggcttctaccccagcgatatcgccgtggagtgggagagcaacggccagcctgagaacaactacaagaccaccccccctgtgctggacagcgacggcagcttcttcctgtacagcaagctgaccgtggacaagagccggtggcagcagggcaacgtgtttagctgcagcgtgatgcacgaggccctgcacaaccactacacccagaagagcttaagcctgtcccctggcagt

SEQ ID NO: 313 - protein, 426 aa, synthetic construct
  REGION 1..426: note = Synthetic
NITNLCPFGEVFNATKFASVYAWNRKRISNCVADYSVLYNSASFSTFKCYGVSPTKLNDLCFTNVYADSFVIRGDEVRQIAPGQTGNIADYNYKLPDDFTGCVIAWNSNNLDSKVGGNYNYRYRLFRKSNLKPFERDISTEIYQAGSRPCNGVKGFNCYFPLQSYGFQPTYGVGYQPYRVVVLSFELLHAPATVCGPKKSTNLVKNKGSGGGGSGGGGSNITNLCPFGEVFNATKFASVYAWNRKRISNCVADYSVLYNSASFSTFKCYGVSPTKLNDLCFTNVYADSFVIRGDEVRQIAPGQTGNIADYNYKLPDDFTGCVIAWNSNNLDSKVGGNYNYRYRLFRKSNLKPFERDISTEIYQAGSRPCNGVKGFNCYFPLQSYGFQPTYGVGYQPYRVVVLSFELLHAPATVCGPKKSTNLVKNK

SEQ ID NO: 314 - DNA, 1278 bp, synthetic construct
  misc_feature 1..1278: note = Synthetic
  source 1..1278: mol_type = other DNA
aatatcacaaacttgtgcccatttggggaggtcttcaatgccactaaatttgcatcagtatatgcatggaatcgtaaacggatatcaaattgcgttgctgactattcagtcctctataatagtgctagtttcagtacatttaaatgctacggagtatctcctactaagttgaatgacctttgcttcacaaatgtctatgctgacagttttgttattaggggtgacgaggtgcggcagattgcacccgggcaaacaggaaacatcgctgactacaattacaaacttcctgatgacttcactggttgtgtgattgcttggaattccaacaatctggattccaaagtgggtgggaattacaattacagatatagattgtttagaaaatctaacctcaagccattcgaacgggatataagcacagaaatctatcaggctgggagcagaccttgtaacggcgtaaaggggttcaattgctattttccacttcagtcatacggctttcaacccacctacggggtgggataccagccatatcgagtggtcgtactctctttcgagctgcttcatgcccccgcaaccgtgtgtggtcccaaaaaaagcaccaatctcgtcaagaataagggatcaggggggggcggatcaggcggtggaggcagcaacataactaatctttgtccattcggtgaagtctttaatgcaaccaaatttgcttctgtgtatgcatggaacaggaaaagaatatccaattgcgttgccgactatagcgtcctttacaattctgcctcctttagcacatttaagtgttatggggtctcccccactaagctgaatgatctgtgtttcaccaacgtttatgcagactcctttgttatacggggggatgaagttcgacaaatagcacccgggcagacagggaacatcgctgactacaattacaagcttccagatgacttcactgggtgcgtaatcgcctggaacagtaacaacttggactctaaagtcggagggaattataattacagatatcgtctcttccgcaaaagtaacttgaagccttttgagagggacatttccacagagatatatcaagcaggttccagaccatgcaacggcgtcaagggatttaattgttatttccccctccaatcatacggctttcagccaacttacggcgttggctaccaaccatacagagtcgtagtgctttcctttgaactgctgcacgcccctgccactgtgtgtggcccaaaaaagagcaccaatttggtaaagaacaag

SEQ ID NO: 315 - protein, 666 aa, synthetic construct
  REGION 1..666: note = Synthetic
NITNLCPFGEVFNATKFASVYAWNRKRISNCVADYSVLYNSASFSTFKCYGVSPTKLNDLCFTNVYADSFVIRGDEVRQIAPGQTGNIADYNYKLPDDFTGCVIAWNSNNLDSKVGGNYNYRYRLFRKSNLKPFERDISTEIYQAGSRPCNGVKGFNCYFPLQSYGFQPTYGVGYQPYRVVVLSFELLHAPATVCGPKKSTNLVKNKGSGGGGSGGGGSNITNLCPFGEVFNATKFASVYAWNRKRISNCVADYSVLYNSASFSTFKCYGVSPTKLNDLCFTNVYADSFVIRGDEVRQIAPGQTGNIADYNYKLPDDFTGCVIAWNSNNLDSKVGGNYNYRYRLFRKSNLKPFERDISTEIYQAGSRPCNGVKGFNCYFPLQSYGFQPTYGVGYQPYRVVVLSFELLHAPATVCGPKKSTNLVKNKGSGGGGDGGGGSGDKTHTCPPCPAPELLGGPSVFLFPPKPKDTLMISRTPEVTCVVVDVSHEDPEVKFNWYVDGVEVHNAKTKPREEQYNSTYRVVSVLTVLHQDWLNGKEYKCKVSNKALPAPIEKTISKAKGQPREPQVYTLPPSREELTKNQVSLTCLVKGFYPSDIAVEWESNGQPENNYKTTPPVLDSDGSFFLYSKLTVDKSRWQQGNVFSCSVMHEALHNHYTQKSLSLSPGS

SEQ ID NO: 316 - DNA, 1998 bp, synthetic construct
  misc_feature 1..1998: note = Synthetic
  source 1..1998: mol_type = other DNA
aatatcacaaacttgtgcccatttggggaggtcttcaatgccactaaatttgcatcagtatatgcatggaatcgtaaacggatatcaaattgcgttgctgactattcagtcctctataatagtgctagtttcagtacatttaaatgctacggagtatctcctactaagttgaatgacctttgcttcacaaatgtctatgctgacagttttgttattaggggtgacgaggtgcggcagattgcacccgggcaaacaggaaacatcgctgactacaattacaaacttcctgatgacttcactggttgtgtgattgcttggaattccaacaatctggattccaaagtgggtgggaattacaattacagatatagattgtttagaaaatctaacctcaagccattcgaacgggatataagcacagaaatctatcaggctgggagcagaccttgtaacggcgtaaaggggttcaattgctattttccacttcagtcatacggctttcaacccacctacggggtgggataccagccatatcgagtggtcgtactctctttcgagctgcttcatgcccccgcaaccgtgtgtggtcccaaaaaaagcaccaatctcgtcaagaataagggatcaggggggggcggatcaggcggtggaggcagcaacataactaatctttgtccattcggtgaagtctttaatgcaaccaaatttgcttctgtgtatgcatggaacaggaaaagaatatccaattgcgttgccgactatagcgtcctttacaattctgcctcctttagcacatttaagtgttatggggtctcccccactaagctgaatgatctgtgtttcaccaacgtttatgcagactcctttgttatacggggggatgaagttcgacaaatagcacccgggcagacagggaacatcgctgactacaattacaagcttccagatgacttcactgggtgcgtaatcgcctggaacagtaacaacttggactctaaagtcggagggaattataattacagatatcgtctcttccgcaaaagtaacttgaagccttttgagagggacatttccacagagatatatcaagcaggttccagaccatgcaacggcgtcaagggatttaattgttatttccccctccaatcatacggctttcagccaacttacggcgttggctaccaaccatacagagtcgtagtgctttcctttgaactgctgcacgcccctgccactgtgtgtggcccaaaaaagagcaccaatttggtaaagaacaagggatccggcggcggcggtgacggtggtggcggctccggagacaagacccacacctgccccccttgtcctgcccctgagctgctgggcggaccctccgtgtttctgttcccccccaagcccaaggacaccctgatgatcagccggacccccgaggtcacctgcgtggtggtggacgtcagccacgaggacccagaggtcaagttcaattggtatgtggacggcgtggaggtgcacaacgccaagaccaagccccgggaggaacagtacaacagcacctaccgggtggtgtccgtgctgaccgtgctgcaccaggactggctgaacggcaaagaatacaagtgcaaggtgtccaacaaggccctgcctgcccccatcgagaaaaccatcagcaaggccaagggccagcccagagaaccccaggtgtacaccctgccccctagcagggaagagctgaccaagaaccaggtgtccctgacctgtctggtcaagggcttctaccccagcgatatcgccgtggagtgggagagcaacggccagcctgagaacaactacaagaccaccccccctgtgctggacagcgacggcagcttcttcctgtacagcaagctgaccgtggacaagagccggtggcagcagggcaacgtgtttagctgcagcgtgatgcacgaggccctgcacaaccactacacccagaagagcttaagcctgtcccctggcagt

SEQ ID NO: 317 - protein, 207 aa, synthetic construct
  REGION 1..207: note = Synthetic
NITNLCPFDEVFNATRFASVYAWNRKRISNCVADYSVLYNLAPFFTFKCYGVSPTKLNDLCFTNVYADSFVIRGDEVRQIAPGQTGNIADYNYKLPDDFTGCVIAWNSKNLDSKVSGNYNYLYRLFRKSNLKPFERDISTEIYQAGNKPCNGVAGFNCYFPLKSYSFRPTYGVGHQPYRVVVLSFELLHAPATVCGPKKSTNLVKNK

SEQ ID NO: 318 - DNA, 621 bp, synthetic construct
  misc_feature 1..621: note = Synthetic
  source 1..621: mol_type = other DNA
aatatcactaatctttgccccttcgatgaagtatttaacgctactcgatttgctagcgtatatgcctggaaccggaagagaataagcaactgtgttgcagactatagcgtgctttacaatcttgctccattctttaccttcaaatgttacggtgtgagccccaccaaactcaatgatctctgtttcacaaacgtgtacgcagatagtttcgttatacgcggggacgaagtacggcagatagcccctggccagacaggaaacatagccgattacaactacaaacttccagacgattttacagggtgtgtgatcgcttggaattcaaaaaacctggactccaaagtgagtggcaactataattacctgtaccgactgttccgcaaaagcaacttgaaacctttcgagcgagatatatcaaccgaaatctaccaagctggtaataaaccttgtaatggtgtggccggatttaactgctacttccctcttaagtcctatagctttaggcctacatacggagtcgggcaccaaccctatagagtcgtggtgttgtcatttgaacttctccatgcacctgctactgtctgtggtccaaaaaagtccactaatcttgtaaaaaacaaa

SEQ ID NO: 319 - protein, 447 aa, synthetic construct
  REGION 1..447: note = Synthetic
NITNLCPFDEVFNATRFASVYAWNRKRISNCVADYSVLYNLAPFFTFKCYGVSPTKLNDLCFTNVYADSFVIRGDEVRQIAPGQTGNIADYNYKLPDDFTGCVIAWNSKNLDSKVSGNYNYLYRLFRKSNLKPFERDISTEIYQAGNKPCNGVAGFNCYFPLKSYSFRPTYGVGHQPYRVVVLSFELLHAPATVCGPKKSTNLVKNKGSGGGGDGGGGSGDKTHTCPPCPAPELLGGPSVFLFPPKPKDTLMISRTPEVTCVVVDVSHEDPEVKFNWYVDGVEVHNAKTKPREEQYNSTYRVVSVLTVLHQDWLNGKEYKCKVSNKALPAPIEKTISKAKGQPREPQVYTLPPSREELTKNQVSLTCLVKGFYPSDIAVEWESNGQPENNYKTTPPVLDSDGSFFLYSKLTVDKSRWQQGNVFSCSVMHEALHNHYTQKSLSLSPGS

SEQ ID NO: 320 - DNA, 1341 bp, synthetic construct
  misc_feature 1..1341: note = Synthetic
  source 1..1341: mol_type = other DNA
aatatcactaatctttgccccttcgatgaagtatttaacgctactcgatttgctagcgtatatgcctggaaccggaagagaataagcaactgtgttgcagactatagcgtgctttacaatcttgctccattctttaccttcaaatgttacggtgtgagccccaccaaactcaatgatctctgtttcacaaacgtgtacgcagatagtttcgttatacgcggggacgaagtacggcagatagcccctggccagacaggaaacatagccgattacaactacaaacttccagacgattttacagggtgtgtgatcgcttggaattcaaaaaacctggactccaaagtgagtggcaactataattacctgtaccgactgttccgcaaaagcaacttgaaacctttcgagcgagatatatcaaccgaaatctaccaagctggtaataaaccttgtaatggtgtggccggatttaactgctacttccctcttaagtcctatagctttaggcctacatacggagtcgggcaccaaccctatagagtcgtggtgttgtcatttgaacttctccatgcacctgctactgtctgtggtccaaaaaagtccactaatcttgtaaaaaacaaaggatccggcggcggcggtgacggtggtggcggctccggagacaagacccacacctgccccccttgtcctgcccctgagctgctgggcggaccctccgtgtttctgttcccccccaagcccaaggacaccctgatgatcagccggacccccgaggtcacctgcgtggtggtggacgtcagccacgaggacccagaggtcaagttcaattggtatgtggacggcgtggaggtgcacaacgccaagaccaagccccgggaggaacagtacaacagcacctaccgggtggtgtccgtgctgaccgtgctgcaccaggactggctgaacggcaaagaatacaagtgcaaggtgtccaacaaggccctgcctgcccccatcgagaaaaccatcagcaaggccaagggccagcccagagaaccccaggtgtacaccctgccccctagcagggaagagctgaccaagaaccaggtgtccctgacctgtctggtcaagggcttctaccccagcgatatcgccgtggagtgggagagcaacggccagcctgagaacaactacaagaccaccccccctgtgctggacagcgacggcagcttcttcctgtacagcaagctgaccgtggacaagagccggtggcagcagggcaacgtgtttagctgcagcgtgatgcacgaggccctgcacaaccactacacccagaagagcttaagcctgtcccctggcagt

SEQ ID NO: 321 - protein, 426 aa, synthetic construct
  REGION 1..426: note = Synthetic
NITNLCPFDEVFNATRFASVYAWNRKRISNCVADYSVLYNLAPFFTFKCYGVSPTKLNDLCFTNVYADSFVIRGDEVRQIAPGQTGNIADYNYKLPDDFTGCVIAWNSNKLDSKVSGNYNYLYRLFRKSNLKPFERDISTEIYQAGNKPCNGVAGFNCYFPLKSYSFRPTYGVGHQPYRVVVLSFELLHAPATVCGPKKSTNLVKNKGSGGGGSGGGGSNITNLCPFDEVFNATRFASVYAWNRKRISNCVADYSVLYNLAPFFTFKCYGVSPTKLNDLCFTNVYADSFVIRGDEVRQIAPGQTGNIADYNYKLPDDFTGCVIAWNSNKLDSKVSGNYNYLYRLFRKSNLKPFERDISTEIYQAGNKPCNGVAGFNCYFPLKSYSFRPTYGVGHQPYRVVVLSFELLHAPATVCGPKKSTNLVKNK

SEQ ID NO: 322 - DNA, 1278 bp, synthetic construct
  misc_feature 1..1278: note = Synthetic
  source 1..1278: mol_type = other DNA
aatatcacaaacttgtgcccatttgatgaggtcttcaatgccactcggtttgcatcagtatatgcatggaatcgtaaacggatatcaaattgcgttgctgactattcagtcctctataatcttgctccattctttacatttaaatgctacggagtatctcctactaagttgaatgacctttgcttcacaaatgtctatgctgacagttttgttattaggggtgacgaggtgcggcagattgcacccgggcaaacaggaaacatcgctgactacaattacaaacttcctgatgacttcactggttgtgtgattgcttggaattccaacaaactggattccaaagtgagtgggaattacaattacttgtatagattgtttagaaaatctaacctcaagccattcgaacgggatataagcacagaaatctatcaggctgggaataaaccttgtaacggcgtagccgggttcaattgctattttccacttaagtcatacagctttaggcccacctacggggtgggacaccagccatatcgagtggtcgtactctctttcgagctgcttcatgcccccgcaaccgtgtgtggtcccaaaaaaagcaccaatctcgtcaagaataagggatcaggggggggcggatcaggcggtggaggcagcaacataactaatctttgtccattcgatgaagtctttaatgcaacccgttttgcttctgtgtatgcatggaacaggaaaagaatatccaattgcgttgccgactatagcgtcctttacaatctcgccccctttttcacatttaagtgttatggggtctcccccactaagctgaatgatctgtgtttcaccaacgtttatgcagactcctttgttatacggggggatgaagttcgacaaatagcacccgggcagacagggaacatcgctgactacaattacaagcttccagatgacttcactgggtgcgtaatcgcctggaacagtaacaaattggactctaaagtctctgggaattataattacctttatcgtctcttccgcaaaagtaacttgaagccttttgagagggacatttccacagagatatatcaagcaggtaataaaccatgcaacggcgtcgccggatttaattgttatttccccctcaaatcatactcctttaggccaacttacggcgttggccaccaaccatacagagtcgtagtgctttcctttgaactgctgcacgcccctgccactgtgtgtggcccaaaaaagagcaccaatttggtaaagaacaag

SEQ ID NO: 323 - protein, 666 aa, synthetic construct
  REGION 1..666: note = Synthetic
NITNLCPFDEVFNATRFASVYAWNRKRISNCVADYSVLYNLAPFFTFKCYGVSPTKLNDLCFTNVYADSFVIRGDEVRQIAPGQTGNIADYNYKLPDDFTGCVIAWNSNKLDSKVSGNYNYLYRLFRKSNLKPFERDISTEIYQAGNKPCNGVAGFNCYFPLKSYSFRPTYGVGHQPYRVVVLSFELLHAPATVCGPKKSTNLVKNKGSGGGGSGGGGSNITNLCPFDEVFNATRFASVYAWNRKRISNCVADYSVLYNLAPFFTFKCYGVSPTKLNDLCFTNVYADSFVIRGDEVRQIAPGQTGNIADYNYKLPDDFTGCVIAWNSNKLDSKVSGNYNYLYRLFRKSNLKPFERDISTEIYQAGNKPCNGVAGFNCYFPLKSYSFRPTYGVGHQPYRVVVLSFELLHAPATVCGPKKSTNLVKNKGSGGGGDGGGGSGDKTHTCPPCPAPELLGGPSVFLFPPKPKDTLMISRTPEVTCVVVDVSHEDPEVKFNWYVDGVEVHNAKTKPREEQYNSTYRVVSVLTVLHQDWLNGKEYKCKVSNKALPAPIEKTISKAKGQPREPQVYTLPPSREELTKNQVSLTCLVKGFYPSDIAVEWESNGQPENNYKTTPPVLDSDGSFFLYSKLTVDKSRWQQGNVFSCSVMHEALHNHYTQKSLSLSPGS

SEQ ID NO: 324 - DNA, 1998 bp, synthetic construct
  misc_feature 1..1998: note = Synthetic
  source 1..1998: mol_type = other DNA
aatatcacaaacttgtgcccatttgatgaggtcttcaatgccactcggtttgcatcagtatatgcatggaatcgtaaacggatatcaaattgcgttgctgactattcagtcctctataatcttgctccattctttacatttaaatgctacggagtatctcctactaagttgaatgacctttgcttcacaaatgtctatgctgacagttttgttattaggggtgacgaggtgcggcagattgcacccgggcaaacaggaaacatcgctgactacaattacaaacttcctgatgacttcactggttgtgtgattgcttggaattccaacaaactggattccaaagtgagtgggaattacaattacttgtatagattgtttagaaaatctaacctcaagccattcgaacgggatataagcacagaaatctatcaggctgggaataaaccttgtaacggcgtagccgggttcaattgctattttccacttaagtcatacagctttaggcccacctacggggtgggacaccagccatatcgagtggtcgtactctctttcgagctgcttcatgcccccgcaaccgtgtgtggtcccaaaaaaagcaccaatctcgtcaagaataagggatcaggggggggcggatcaggcggtggaggcagcaacataactaatctttgtccattcgatgaagtctttaatgcaacccgttttgcttctgtgtatgcatggaacaggaaaagaatatccaattgcgttgccgactatagcgtcctttacaatctcgccccctttttcacatttaagtgttatggggtctcccccactaagctgaatgatctgtgtttcaccaacgtttatgcagactcctttgttatacggggggatgaagttcgacaaatagcacccgggcagacagggaacatcgctgactacaattacaagcttccagatgacttcactgggtgcgtaatcgcctggaacagtaacaaattggactctaaagtctctgggaattataattacctttatcgtctcttccgcaaaagtaacttgaagccttttgagagggacatttccacagagatatatcaagcaggtaataaaccatgcaacggcgtcgccggatttaattgttatttccccctcaaatcatactcctttaggccaacttacggcgttggccaccaaccatacagagtcgtagtgctttcctttgaactgctgcacgcccctgccactgtgtgtggcccaaaaaagagcaccaatttggtaaagaacaagggatccggcggcggcggtgacggtggtggcggctccggagacaagacccacacctgccccccttgtcctgcccctgagctgctgggcggaccctccgtgtttctgttcccccccaagcccaaggacaccctgatgatcagccggacccccgaggtcacctgcgtggtggtggacgtcagccacgaggacccagaggtcaagttcaattggtatgtggacggcgtggaggtgcacaacgccaagaccaagccccgggaggaacagtacaacagcacctaccgggtggtgtccgtgctgaccgtgctgcaccaggactggctgaacggcaaagaatacaagtgcaaggtgtccaacaaggccctgcctgcccccatcgagaaaaccatcagcaaggccaagggccagcccagagaaccccaggtgtacaccctgccccctagcagggaagagctgaccaagaaccaggtgtccctgacctgtctggtcaagggcttctaccccagcgatatcgccgtggagtgggagagcaacggccagcctgagaacaactacaagaccaccccccctgtgctggacagcgacggcagcttcttcctgtacagcaagctgaccgtggacaagagccggtggcagcagggcaacgtgtttagctgcagcgtgatgcacgaggccctgcacaaccactacacccagaagagcttaagcctgtcccctggcagt

SEQ ID NO: 325 - protein, 207 aa, synthetic construct
  REGION 1..207: note = Synthetic
NITNLCPFDEVFNATRFASVYAWNRKRISNCVADYSVLYNLAPFFTFKCYGVSPTKLNDLCFTNVYADSFVIRGDEVRQIAPGQTGNIADYNYKLPDDFTGCVIAWNSKNLDSKVSGNYNYLYRLFRKSNLKPFERDISTEIYQAGNKPCNGVAGFNCYFPLRSYSFRPTYGVGHQPYRVVVLSFELLHAPATVCGPKKSTNLVKNK

SEQ ID NO: 326 - DNA, 621 bp, synthetic construct
  misc_feature 1..621: note = Synthetic
  source 1..621: mol_type = other DNA
aatatcactaatctttgccccttcgatgaagtatttaacgctactcgatttgctagcgtatatgcctggaaccggaagagaataagcaactgtgttgcagactatagcgtgctttacaatcttgctccattctttaccttcaaatgttacggtgtgagccccaccaaactcaatgatctctgtttcacaaacgtgtacgcagatagtttcgttatacgcggggacgaagtacggcagatagcccctggccagacaggaaacatagccgattacaactacaaacttccagacgattttacagggtgtgtgatcgcttggaattcaaaaaacctggactccaaagtgagtggcaactataattacctgtaccgactgttccgcaaaagcaacttgaaacctttcgagcgagatatatcaaccgaaatctaccaagctggtaataaaccttgtaatggtgtggccggatttaactgctacttccctcttagatcctatagctttaggcctacatacggagtcgggcaccaaccctatagagtcgtggtgttgtcatttgaacttctccatgcacctgctactgtctgtggtccaaaaaagtccactaatcttgtaaaaaacaaa

SEQ ID NO: 327 - protein, 447 aa, synthetic construct
  REGION 1..447: note = Synthetic
NITNLCPFDEVFNATRFASVYAWNRKRISNCVADYSVLYNLAPFFTFKCYGVSPTKLNDLCFTNVYADSFVIRGDEVRQIAPGQTGNIADYNYKLPDDFTGCVIAWNSKNLDSKVSGNYNYLYRLFRKSNLKPFERDISTEIYQAGNKPCNGVAGFNCYFPLRSYSFRPTYGVGHQPYRVVVLSFELLHAPATVCGPKKSTNLVKNKGSGGGGDGGGGSGDKTHTCPPCPAPELLGGPSVFLFPPKPKDTLMISRTPEVTCVVVDVSHEDPEVKFNWYVDGVEVHNAKTKPREEQYNSTYRVVSVLTVLHQDWLNGKEYKCKVSNKALPAPIEKTISKAKGQPREPQVYTLPPSREELTKNQVSLTCLVKGFYPSDIAVEWESNGQPENNYKTTPPVLDSDGSFFLYSKLTVDKSRWQQGNVFSCSVMHEALHNHYTQKSLSLSPGS

SEQ ID NO: 328 - DNA, 1341 bp, synthetic construct
  misc_feature 1..1341: note = Synthetic
  source 1..1341: mol_type = other DNA
aatatcactaatctttgccccttcgatgaagtatttaacgctactcgatttgctagcgtatatgcctggaaccggaagagaataagcaactgtgttgcagactatagcgtgctttacaatcttgctccattctttaccttcaaatgttacggtgtgagccccaccaaactcaatgatctctgtttcacaaacgtgtacgcagatagtttcgttatacgcggggacgaagtacggcagatagcccctggccagacaggaaacatagccgattacaactacaaacttccagacgattttacagggtgtgtgatcgcttggaattcaaaaaacctggactccaaagtgagtggcaactataattacctgtaccgactgttccgcaaaagcaacttgaaacctttcgagcgagatatatcaaccgaaatctaccaagctggtaataaaccttgtaatggtgtggccggatttaactgctacttccctcttagatcctatagctttaggcctacatacggagtcgggcaccaaccctatagagtcgtggtgttgtcatttgaacttctccatgcacctgctactgtctgtggtccaaaaaagtccactaatcttgtaaaaaacaaaggatccggcggcggcggtgacggtggtggcggctccggagacaagacccacacctgccccccttgtcctgcccctgagctgctgggcggaccctccgtgtttctgttcccccccaagcccaaggacaccctgatgatcagccggacccccgaggtcacctgcgtggtggtggacgtcagccacgaggacccagaggtcaagttcaattggtatgtggacggcgtggaggtgcacaacgccaagaccaagccccgggaggaacagtacaacagcacctaccgggtggtgtccgtgctgaccgtgctgcaccaggactggctgaacggcaaagaatacaagtgcaaggtgtccaacaaggccctgcctgcccccatcgagaaaaccatcagcaaggccaagggccagcccagagaaccccaggtgtacaccctgccccctagcagggaagagctgaccaagaaccaggtgtccctgacctgtctggtcaagggcttctaccccagcgatatcgccgtggagtgggagagcaacggccagcctgagaacaactacaagaccaccccccctgtgctggacagcgacggcagcttcttcctgtacagcaagctgaccgtggacaagagccggtggcagcagggcaacgtgtttagctgcagcgtgatgcacgaggccctgcacaaccactacacccagaagagcttaagcctgtcccctggcagt

SEQ ID NO: 329 - protein, 426 aa, synthetic construct
  REGION 1..426: note = Synthetic
NITNLCPFDEVFNATRFASVYAWNRKRISNCVADYSVLYNLAPFFTFKCYGVSPTKLNDLCFTNVYADSFVIRGDEVRQIAPGQTGNIADYNYKLPDDFTGCVIAWNSNKLDSKVSGNYNYLYRLFRKSNLKPFERDISTEIYQAGNKPCNGVAGFNCYFPLRSYSFRPTYGVGHQPYRVVVLSFELLHAPATVCGPKKSTNLVKNKGSGGGGSGGGGSNITNLCPFDEVFNATRFASVYAWNRKRISNCVADYSVLYNLAPFFTFKCYGVSPTKLNDLCFTNVYADSFVIRGDEVRQIAPGQTGNIADYNYKLPDDFTGCVIAWNSNKLDSKVSGNYNYLYRLFRKSNLKPFERDISTEIYQAGNKPCNGVAGFNCYFPLRSYSFRPTYGVGHQPYRVVVLSFELLHAPATVCGPKKSTNLVKNK

SEQ ID NO: 330 - DNA, 1278 bp, synthetic construct
  misc_feature 1..1278: note = Synthetic
  source 1..1278: mol_type = other DNA
aatatcacaaacttgtgcccatttgatgaggtcttcaatgccactcggtttgcatcagtatatgcatggaatcgtaaacggatatcaaattgcgttgctgactattcagtcctctataatcttgctccattctttacatttaaatgctacggagtatctcctactaagttgaatgacctttgcttcacaaatgtctatgctgacagttttgttattaggggtgacgaggtgcggcagattgcacccgggcaaacaggaaacatcgctgactacaattacaaacttcctgatgacttcactggttgtgtgattgcttggaattccaacaaactggattccaaagtgagtgggaattacaattacttgtatagattgtttagaaaatctaacctcaagccattcgaacgggatataagcacagaaatctatcaggctgggaataaaccttgtaacggcgtagccgggttcaattgctattttccacttagatcatacagctttaggcccacctacggggtgggacaccagccatatcgagtggtcgtactctctttcgagctgcttcatgcccccgcaaccgtgtgtggtcccaaaaaaagcaccaatctcgtcaagaataagggatcaggggggggcggatcaggcggtggaggcagcaacataactaatctttgtccattcgatgaagtctttaatgcaacccgttttgcttctgtgtatgcatggaacaggaaaagaatatccaattgcgttgccgactatagcgtcctttacaatctcgccccctttttcacatttaagtgttatggggtctcccccactaagctgaatgatctgtgtttcaccaacgtttatgcagactcctttgttatacggggggatgaagttcgacaaatagcacccgggcagacagggaacatcgctgactacaattacaagcttccagatgacttcactgggtgcgtaatcgcctggaacagtaacaaattggactctaaagtctctgggaattataattacctttatcgtctcttccgcaaaagtaacttgaagccttttgagagggacatttccacagagatatatcaagcaggtaataaaccatgcaacggcgtcgccggatttaattgttatttccccctcagatcatactcctttaggccaacttacggcgttggccaccaaccatacagagtcgtagtgctttcctttgaactgctgcacgcccctgccactgtgtgtggcccaaaaaagagcaccaatttggtaaagaacaag

SEQ ID NO: 331 - protein, 666 aa, synthetic construct
  REGION 1..666: note = Synthetic
NITNLCPFDEVFNATRFASVYAWNRKRISNCVADYSVLYNLAPFFTFKCYGVSPTKLNDLCFTNVYADSFVIRGDEVRQIAPGQTGNIADYNYKLPDDFTGCVIAWNSNKLDSKVSGNYNYLYRLFRKSNLKPFERDISTEIYQAGNKPCNGVAGFNCYFPLRSYSFRPTYGVGHQPYRVVVLSFELLHAPATVCGPKKSTNLVKNKGSGGGGSGGGGSNITNLCPFDEVFNATRFASVYAWNRKRISNCVADYSVLYNLAPFFTFKCYGVSPTKLNDLCFTNVYADSFVIRGDEVRQIAPGQTGNIADYNYKLPDDFTGCVIAWNSNKLDSKVSGNYNYLYRLFRKSNLKPFERDISTEIYQAGNKPCNGVAGFNCYFPLRSYSFRPTYGVGHQPYRVVVLSFELLHAPATVCGPKKSTNLVKNKGSGGGGDGGGGSGDKTHTCPPCPAPELLGGPSVFLFPPKPKDTLMISRTPEVTCVVVDVSHEDPEVKFNWYVDGVEVHNAKTKPREEQYNSTYRVVSVLTVLHQDWLNGKEYKCKVSNKALPAPIEKTISKAKGQPREPQVYTLPPSREELTKNQVSLTCLVKGFYPSDIAVEWESNGQPENNYKTTPPVLDSDGSFFLYSKLTVDKSRWQQGNVFSCSVMHEALHNHYTQKSLSLSPGS

SEQ ID NO: 332 - DNA, 1998 bp, synthetic construct
  misc_feature 1..1998: note = Synthetic
  source 1..1998: mol_type = other DNA
aatatcacaaacttgtgcccatttgatgaggtcttcaatgccactcggtttgcatcagtatatgcatggaatcgtaaacggatatcaaattgcgttgctgactattcagtcctctataatcttgctccattctttacatttaaatgctacggagtatctcctactaagttgaatgacctttgcttcacaaatgtctatgctgacagttttgttattaggggtgacgaggtgcggcagattgcacccgggcaaacaggaaacatcgctgactacaattacaaacttcctgatgacttcactggttgtgtgattgcttggaattccaacaaactggattccaaagtgagtgggaattacaattacttgtatagattgtttagaaaatctaacctcaagccattcgaacgggatataagcacagaaatctatcaggctgggaataaaccttgtaacggcgtagccgggttcaattgctattttccacttagatcatacagctttaggcccacctacggggtgggacaccagccatatcgagtggtcgtactctctttcgagctgcttcatgcccccgcaaccgtgtgtggtcccaaaaaaagcaccaatctcgtcaagaataagggatcaggggggggcggatcaggcggtggaggcagcaacataactaatctttgtccattcgatgaagtctttaatgcaacccgttttgcttctgtgtatgcatggaacaggaaaagaatatccaattgcgttgccgactatagcgtcctttacaatctcgccccctttttcacatttaagtgttatggggtctcccccactaagctgaatgatctgtgtttcaccaacgtttatgcagactcctttgttatacggggggatgaagttcgacaaatagcacccgggcagacagggaacatcgctgactacaattacaagcttccagatgacttcactgggtgcgtaatcgcctggaacagtaacaaattggactctaaagtctctgggaattataattacctttatcgtctcttccgcaaaagtaacttgaagccttttgagagggacatttccacagagatatatcaagcaggtaataaaccatgcaacggcgtcgccggatttaattgttatttccccctcagatcatactcctttaggccaacttacggcgttggccaccaaccatacagagtcgtagtgctttcctttgaactgctgcacgcccctgccactgtgtgtggcccaaaaaagagcaccaatttggtaaagaacaagggatccggcggcggcggtgacggtggtggcggctccggagacaagacccacacctgccccccttgtcctgcccctgagctgctgggcggaccctccgtgtttctgttcccccccaagcccaaggacaccctgatgatcagccggacccccgaggtcacctgcgtggtggtggacgtcagccacgaggacccagaggtcaagttcaattggtatgtggacggcgtggaggtgcacaacgccaagaccaagccccgggaggaacagtacaacagcacctaccgggtggtgtccgtgctgaccgtgctgcaccaggactggctgaacggcaaagaatacaagtgcaaggtgtccaacaaggccctgcctgcccccatcgagaaaaccatcagcaaggccaagggccagcccagagaaccccaggtgtacaccctgccccctagcagggaagagctgaccaagaaccaggtgtccctgacctgtctggtcaagggcttctaccccagcgatatcgccgtggagtgggagagcaacggccagcctgagaacaactacaagaccaccccccctgtgctggacagcgacggcagcttcttcctgtacagcaagctgaccgtggacaagagccggtggcagcagggcaacgtgtttagctgcagcgtgatgcacgaggccctgcacaaccactacacccagaagagcttaagcctgtcccctggcagt

SEQ ID NO: 333 - protein, 207 aa, synthetic construct
  REGION 1..207: note = Synthetic
NITNLCPFDEVFNATKFASVYAWNRKRISNCVADYSVLYNLAPFFTFKCYGVSPTKLNDLCFTNVYADSFVIRGDEVRQIAPGQTGNIADYNYKLPDDFTGCVIAWNSKNLDSKVSGNYNYRYRLFRKSNLKPFERDISTEIYQAGNKPCNGVKGFNCYFPLRSYSFRPTYGVGHQPYRVVVLSFELLHAPATVCGPKKSTNLVKNK

SEQ ID NO: 334 - DNA, 621 bp, synthetic construct
  misc_feature 1..621: note = Synthetic
  source 1..621: mol_type = other DNA
aatatcactaatctttgccccttcgatgaagtatttaacgctactaaatttgctagcgtatatgcctggaaccggaagagaataagcaactgtgttgcagactatagcgtgctttacaatcttgctccattctttaccttcaaatgttacggtgtgagccccaccaaactcaatgatctctgtttcacaaacgtgtacgcagatagtttcgttatacgcggggacgaagtacggcagatagcccctggccagacaggaaacatagccgattacaactacaaacttccagacgattttacagggtgtgtgatcgcttggaattcaaaaaacctggactccaaagtgagtggcaactataattacagataccgactgttccgcaaaagcaacttgaaacctttcgagcgagatatatcaaccgaaatctaccaagctggtaataaaccttgtaatggtgtgaagggatttaactgctacttccctcttagatcctatagctttaggcctacatacggagtcgggcaccaaccctatagagtcgtggtgttgtcatttgaacttctccatgcacctgctactgtctgtggtccaaaaaagtccactaatcttgtaaaaaacaaa

SEQ ID NO: 335 - protein, 447 aa, synthetic construct
  REGION 1..447: note = Synthetic
NITNLCPFDEVFNATKFASVYAWNRKRISNCVADYSVLYNLAPFFTFKCYGVSPTKLNDLCFTNVYADSFVIRGDEVRQIAPGQTGNIADYNYKLPDDFTGCVIAWNSKNLDSKVSGNYNYRYRLFRKSNLKPFERDISTEIYQAGNKPCNGVKGFNCYFPLRSYSFRPTYGVGHQPYRVVVLSFELLHAPATVCGPKKSTNLVKNKGSGGGGDGGGGSGDKTHTCPPCPAPELLGGPSVFLFPPKPKDTLMISRTPEVTCVVVDVSHEDPEVKFNWYVDGVEVHNAKTKPREEQYNSTYRVVSVLTVLHQDWLNGKEYKCKVSNKALPAPIEKTISKAKGQPREPQVYTLPPSREELTKNQVSLTCLVKGFYPSDIAVEWESNGQPENNYKTTPPVLDSDGSFFLYSKLTVDKSRWQQGNVFSCSVMHEALHNHYTQKSLSLSPGS

SEQ ID NO: 336 - DNA, 1341 bp, synthetic construct
  misc_feature 1..1341: note = Synthetic
  source 1..1341: mol_type = other DNA
aatatcactaatctttgccccttcgatgaagtatttaacgctactaaatttgctagcgtatatgcctggaaccggaagagaataagcaactgtgttgcagactatagcgtgctttacaatcttgctccattctttaccttcaaatgttacggtgtgagccccaccaaactcaatgatctctgtttcacaaacgtgtacgcagatagtttcgttatacgcggggacgaagtacggcagatagcccctggccagacaggaaacatagccgattacaactacaaacttccagacgattttacagggtgtgtgatcgcttggaattcaaaaaacctggactccaaagtgagtggcaactataattacagataccgactgttccgcaaaagcaacttgaaacctttcgagcgagatatatcaaccgaaatctaccaagctggtaataaaccttgtaatggtgtgaagggatttaactgctacttccctcttagatcctatagctttaggcctacatacggagtcgggcaccaaccctatagagtcgtggtgttgtcatttgaacttctccatgcacctgctactgtctgtggtccaaaaaagtccactaatcttgtaaaaaacaaaggatccggcggcggcggtgacggtggtggcggctccggagacaagacccacacctgccccccttgtcctgcccctgagctgctgggcggaccctccgtgtttctgttcccccccaagcccaaggacaccctgatgatcagccggacccccgaggtcacctgcgtggtggtggacgtcagccacgaggacccagaggtcaagttcaattggtatgtggacggcgtggaggtgcacaacgccaagaccaagccccgggaggaacagtacaacagcacctaccgggtggtgtccgtgctgaccgtgctgcaccaggactggctgaacggcaaagaatacaagtgcaaggtgtccaacaaggccctgcctgcccccatcgagaaaaccatcagcaaggccaagggccagcccagagaaccccaggtgtacaccctgccccctagcagggaagagctgaccaagaaccaggtgtccctgacctgtctggtcaagggcttctaccccagcgatatcgccgtggagtgggagagcaacggccagcctgagaacaactacaagaccaccccccctgtgctggacagcgacggcagcttcttcctgtacagcaagctgaccgtggacaagagccggtggcagcagggcaacgtgtttagctgcagcgtgatgcacgaggccctgcacaaccactacacccagaagagcttaagcctgtcccctggcagt

SEQ ID NO: 337 - protein, 426 aa, synthetic construct
  REGION 1..426: note = Synthetic
NITNLCPFDEVFNATKFASVYAWNRKRISNCVADYSVLYNLAPFFTFKCYGVSPTKLNDLCFTNVYADSFVIRGDEVRQIAPGQTGNIADYNYKLPDDFTGCVIAWNSNKLDSKVSGNYNYRYRLFRKSNLKPFERDISTEIYQAGNKPCNGVKGFNCYFPLRSYSFRPTYGVGHQPYRVVVLSFELLHAPATVCGPKKSTNLVKNKGSGGGGSGGGGSNITNLCPFDEVFNATKFASVYAWNRKRISNCVADYSVLYNLAPFFTFKCYGVSPTKLNDLCFTNVYADSFVIRGDEVRQIAPGQTGNIADYNYKLPDDFTGCVIAWNSNKLDSKVSGNYNYRYRLFRKSNLKPFERDISTEIYQAGNKPCNGVKGFNCYFPLRSYSFRPTYGVGHQPYRVVVLSFELLHAPATVCGPKKSTNLVKNK

SEQ ID NO: 338 - DNA, 1278 bp, synthetic construct
  misc_feature 1..1278: note = Synthetic
  source 1..1278: mol_type = other DNA
aatatcacaaacttgtgcccatttgatgaggtcttcaatgccactaaatttgcatcagtatatgcatggaatcgtaaacggatatcaaattgcgttgctgactattcagtcctctataatcttgctccattctttacatttaaatgctacggagtatctcctactaagttgaatgacctttgcttcacaaatgtctatgctgacagttttgttattaggggtgacgaggtgcggcagattgcacccgggcaaacaggaaacatcgctgactacaattacaaacttcctgatgacttcactggttgtgtgattgcttggaattccaacaaactggattccaaagtgagtgggaattacaattacagatatagattgtttagaaaatctaacctcaagccattcgaacgggatataagcacagaaatctatcaggctgggaataaaccttgtaacggcgtaaaagggttcaattgctattttccacttaggtcatacagctttaggcccacctacggggtgggacaccagccatatcgagtggtcgtactctctttcgagctgcttcatgcccccgcaaccgtgtgtggtcccaaaaaaagcaccaatctcgtcaagaataagggatcaggggggggcggatcaggcggtggaggcagcaacataactaatctttgtccattcgatgaagtctttaatgcaaccaaatttgcttctgtgtatgcatggaacaggaaaagaatatccaattgcgttgccgactatagcgtcctttacaatctcgccccctttttcacatttaagtgttatggggtctcccccactaagctgaatgatctgtgtttcaccaacgtttatgcagactcctttgttatacggggggatgaagttcgacaaatagcacccgggcagacagggaacatcgctgactacaattacaagcttccagatgacttcactgggtgcgtaatcgcctggaacagtaacaaattggactctaaagtctctgggaattataattaccgttatcgtctcttccgcaaaagtaacttgaagccttttgagagggacatttccacagagatatatcaagcaggtaataaaccatgcaacggcgtcaaaggatttaattgttatttccccctcaggtcatactcctttaggccaacttacggcgttggccaccaaccatacagagtcgtagtgctttcctttgaactgctgcacgcccctgccactgtgtgtggcccaaaaaagagcaccaatttggtaaagaacaag

SEQ ID NO: 339 - protein, 666 aa, synthetic construct
  REGION 1..666: note = Synthetic
NITNLCPFDEVFNATKFASVYAWNRKRISNCVADYSVLYNLAPFFTFKCYGVSPTKLNDLCFTNVYADSFVIRGDEVRQIAPGQTGNIADYNYKLPDDFTGCVIAWNSNKLDSKVSGNYNYRYRLFRKSNLKPFERDISTEIYQAGNKPCNGVKGFNCYFPLRSYSFRPTYGVGHQPYRVVVLSFELLHAPATVCGPKKSTNLVKNKGSGGGGSGGGGSNITNLCPFDEVFNATKFASVYAWNRKRISNCVADYSVLYNLAPFFTFKCYGVSPTKLNDLCFTNVYADSFVIRGDEVRQIAPGQTGNIADYNYKLPDDFTGCVIAWNSNKLDSKVSGNYNYRYRLFRKSNLKPFERDISTEIYQAGNKPCNGVKGFNCYFPLRSYSFRPTYGVGHQPYRVVVLSFELLHAPATVCGPKKSTNLVKNKGSGGGGDGGGGSGDKTHTCPPCPAPELLGGPSVFLFPPKPKDTLMISRTPEVTCVVVDVSHEDPEVKFNWYVDGVEVHNAKTKPREEQYNSTYRVVSVLTVLHQDWLNGKEYKCKVSNKALPAPIEKTISKAKGQPREPQVYTLPPSREELTKNQVSLTCLVKGFYPSDIAVEWESNGQPENNYKTTPPVLDSDGSFFLYSKLTVDKSRWQQGNVFSCSVMHEALHNHYTQKSLSLSPGS

SEQ ID NO: 340 - DNA, 1998 bp, synthetic construct
  misc_feature 1..1998: note = Synthetic
  source 1..1998: mol_type = other DNA
aatatcacaaacttgtgcccatttgatgaggtcttcaatgccactaaatttgcatcagtatatgcatggaatcgtaaacggatatcaaattgcgttgctgactattcagtcctctataatcttgctccattctttacatttaaatgctacggagtatctcctactaagttgaatgacctttgcttcacaaatgtctatgctgacagttttgttattaggggtgacgaggtgcggcagattgcacccgggcaaacaggaaacatcgctgactacaattacaaacttcctgatgacttcactggttgtgtgattgcttggaattccaacaaactggattccaaagtgagtgggaattacaattacagatatagattgtttagaaaatctaacctcaagccattcgaacgggatataagcacagaaatctatcaggctgggaataaaccttgtaacggcgtaaaagggttcaattgctattttccacttaggtcatacagctttaggcccacctacggggtgggacaccagccatatcgagtggtcgtactctctttcgagctgcttcatgcccccgcaaccgtgtgtggtcccaaaaaaagcaccaatctcgtcaagaataagggatcaggggggggcggatcaggcggtggaggcagcaacataactaatctttgtccattcgatgaagtctttaatgcaaccaaatttgcttctgtgtatgcatggaacaggaaaagaatatccaattgcgttgccgactatagcgtcctttacaatctcgccccctttttcacatttaagtgttatggggtctcccccactaagctgaatgatctgtgtttcaccaacgtttatgcagactcctttgttatacggggggatgaagttcgacaaatagcacccgggcagacagggaacatcgctgactacaattacaagcttccagatgacttcactgggtgcgtaatcgcctggaacagtaacaaattggactctaaagtctctgggaattataattaccgttatcgtctcttccgcaaaagtaacttgaagccttttgagagggacatttccacagagatatatcaagcaggtaataaaccatgcaacggcgtcaaaggatttaattgttatttccccctcaggtcatactcctttaggccaacttacggcgttggccaccaaccatacagagtcgtagtgctttcctttgaactgctgcacgcccctgccactgtgtgtggcccaaaaaagagcaccaatttggtaaagaacaagggatccggcggcggcggtgacggtggtggcggctccggagacaagacccacacctgccccccttgtcctgcccctgagctgctgggcggaccctccgtgtttctgttcccccccaagcccaaggacaccctgatgatcagccggacccccgaggtcacctgcgtggtggtggacgtcagccacgaggacccagaggtcaagttcaattggtatgtggacggcgtggaggtgcacaacgccaagaccaagccccgggaggaacagtacaacagcacctaccgggtggtgtccgtgctgaccgtgctgcaccaggactggctgaacggcaaagaatacaagtgcaaggtgtccaacaaggccctgcctgcccccatcgagaaaaccatcagcaaggccaagggccagcccagagaaccccaggtgtacaccctgccccctagcagggaagagctgaccaagaaccaggtgtccctgacctgtctggtcaagggcttctaccccagcgatatcgccgtggagtgggagagcaacggccagcctgagaacaactacaagaccaccccccctgtgctggacagcgacggcagcttcttcctgtacagcaagctgaccgtggacaagagccggtggcagcagggcaacgtgtttagctgcagcgtgatgcacgaggccctgcacaaccactacacccagaagagcttaagcctgtcccctggcagt

SEQ ID NO: 341 - protein, 207 aa, synthetic construct
  REGION 1..207: note = Synthetic
NITNLCPFDEVFNATKFASVYAWNRKRISNCVADYSVLYNLAPFFTFKCYGVSPTKLNDLCFTNVYADSFVIRGDEVRQIAPGQTGNIADYNYKLPDDFTGCVIAWNSKNLDSKVSGNYNYRYRLFRKSNLKPFERDISTEIYQAGNKPCNGVAGFNCYFPLRSYSFRPTYGVGHQPYRVVVLSFELLHAPATVCGPKKSTNLVKNK

SEQ ID NO: 342 - DNA, 621 bp, synthetic construct
  misc_feature 1..621: note = Synthetic
  source 1..621: mol_type = other DNA
aatatcactaatctttgccccttcgatgaagtatttaacgctactaaatttgctagcgtatatgcctggaaccggaagagaataagcaactgtgttgcagactatagcgtgctttacaatcttgctccattctttaccttcaaatgttacggtgtgagccccaccaaactcaatgatctctgtttcacaaacgtgtacgcagatagtttcgttatacgcggggacgaagtacggcagatagcccctggccagacaggaaacatagccgattacaactacaaacttccagacgattttacagggtgtgtgatcgcttggaattcaaaaaacctggactccaaagtgagtggcaactataattacagataccgactgttccgcaaaagcaacttgaaacctttcgagcgagatatatcaaccgaaatctaccaagctggtaataaaccttgtaatggtgtggccggatttaactgctacttccctcttagatcctatagctttaggcctacatacggagtcgggcaccaaccctatagagtcgtggtgttgtcatttgaacttctccatgcacctgctactgtctgtggtccaaaaaagtccactaatcttgtaaaaaacaaa

SEQ ID NO: 343 - protein, 447 aa, synthetic construct
  REGION 1..447: note = Synthetic
NITNLCPFDEVFNATKFASVYAWNRKRISNCVADYSVLYNLAPFFTFKCYGVSPTKLNDLCFTNVYADSFVIRGDEVRQIAPGQTGNIADYNYKLPDDFTGCVIAWNSKNLDSKVSGNYNYRYRLFRKSNLKPFERDISTEIYQAGNKPCNGVAGFNCYFPLRSYSFRPTYGVGHQPYRVVVLSFELLHAPATVCGPKKSTNLVKNKGSGGGGDGGGGSGDKTHTCPPCPAPELLGGPSVFLFPPKPKDTLMISRTPEVTCVVVDVSHEDPEVKFNWYVDGVEVHNAKTKPREEQYNSTYRVVSVLTVLHQDWLNGKEYKCKVSNKALPAPIEKTISKAKGQPREPQVYTLPPSREELTKNQVSLTCLVKGFYPSDIAVEWESNGQPENNYKTTPPVLDSDGSFFLYSKLTVDKSRWQQGNVFSCSVMHEALHNHYTQKSLSLSPGS

SEQ ID NO: 344 - DNA, 1341 bp, synthetic construct
  misc_feature 1..1341: note = Synthetic
  source 1..1341: mol_type = other DNA
aatatcactaatctttgccccttcgatgaagtatttaacgctactaaatttgctagcgtatatgcctggaaccggaagagaataagcaactgtgttgcagactatagcgtgctttacaatcttgctccattctttaccttcaaatgttacggtgtgagccccaccaaactcaatgatctctgtttcacaaacgtgtacgcagatagtttcgttatacgcggggacgaagtacggcagatagcccctggccagacaggaaacatagccgattacaactacaaacttccagacgattttacagggtgtgtgatcgcttggaattcaaaaaacctggactccaaagtgagtggcaactataattacagataccgactgttccgcaaaagcaacttgaaacctttcgagcgagatatatcaaccgaaatctaccaagctggtaataaaccttgtaatggtgtggccggatttaactgctacttccctcttagatcctatagctttaggcctacatacggagtcgggcaccaaccctatagagtcgtggtgttgtcatttgaacttctccatgcacctgctactgtctgtggtccaaaaaagtccactaatcttgtaaaaaacaaaggatccggcggcggcggtgacggtggtggcggctccggagacaagacccacacctgccccccttgtcctgcccctgagctgctgggcggaccctccgtgtttctgttcccccccaagcccaaggacaccctgatgatcagccggacccccgaggtcacctgcgtggtggtggacgtcagccacgaggacccagaggtcaagttcaattggtatgtggacggcgtggaggtgcacaacgccaagaccaagccccgggaggaacagtacaacagcacctaccgggtggtgtccgtgctgaccgtgctgcaccaggactggctgaacggcaaagaatacaagtgcaaggtgtccaacaaggccctgcctgcccccatcgagaaaaccatcagcaaggccaagggccagcccagagaaccccaggtgtacaccctgccccctagcagggaagagctgaccaagaaccaggtgtccctgacctgtctggtcaagggcttctaccccagcgatatcgccgtggagtgggagagcaacggccagcctgagaacaactacaagaccaccccccctgtgctggacagcgacggcagcttcttcctgtacagcaagctgaccgtggacaagagccggtggcagcagggcaacgtgtttagctgcagcgtgatgcacgaggccctgcacaaccactacacccagaagagcttaagcctgtcccctggcagt

SEQ ID NO: 345 - protein, 426 aa, synthetic construct
  REGION 1..426: note = Synthetic
NITNLCPFDEVFNATKFASVYAWNRKRISNCVADYSVLYNLAPFFTFKCYGVSPTKLNDLCFTNVYADSFVIRGDEVRQIAPGQTGNIADYNYKLPDDFTGCVIAWNSNKLDSKVSGNYNYRYRLFRKSNLKPFERDISTEIYQAGNKPCNGVAGFNCYFPLRSYSFRPTYGVGHQPYRVVVLSFELLHAPATVCGPKKSTNLVKNKGSGGGGSGGGGSNITNLCPFDEVFNATKFASVYAWNRKRISNCVADYSVLYNLAPFFTFKCYGVSPTKLNDLCFTNVYADSFVIRGDEVRQIAPGQTGNIADYNYKLPDDFTGCVIAWNSNKLDSKVSGNYNYRYRLFRKSNLKPFERDISTEIYQAGNKPCNGVAGFNCYFPLRSYSFRPTYGVGHQPYRVVVLSFELLHAPATVCGPKKSTNLVKNK

SEQ ID NO: 346 - DNA, 1278 bp, synthetic construct
  misc_feature 1..1278: note = Synthetic
  source 1..1278: mol_type = other DNA
aatatcacaaacttgtgcccatttgatgaggtcttcaatgccactaaatttgcatcagtatatgcatggaatcgtaaacggatatcaaattgcgttgctgactattcagtcctctataatcttgctccattctttacatttaaatgctacggagtatctcctactaagttgaatgacctttgcttcacaaatgtctatgctgacagttttgttattaggggtgacgaggtgcggcagattgcacccgggcaaacaggaaacatcgctgactacaattacaaacttcctgatgacttcactggttgtgtgattgcttggaattccaacaaactggattccaaagtgagtgggaattacaattacagatatagattgtttagaaaatctaacctcaagccattcgaacgggatataagcacagaaatctatcaggctgggaataaaccttgtaacggcgtagccgggttcaattgctattttccacttaggtcatacagctttaggcccacctacggggtgggacaccagccatatcgagtggtcgtactctctttcgagctgcttcatgcccccgcaaccgtgtgtggtcccaaaaaaagcaccaatctcgtcaagaataagggatcaggggggggcggatcaggcggtggaggcagcaacataactaatctttgtccattcgatgaagtctttaatgcaaccaaatttgcttctgtgtatgcatggaacaggaaaagaatatccaattgcgttgccgactatagcgtcctttacaatctcgccccctttttcacatttaagtgttatggggtctcccccactaagctgaatgatctgtgtttcaccaacgtttatgcagactcctttgttatacggggggatgaagttcgacaaatagcacccgggcagacagggaacatcgctgactacaattacaagcttccagatgacttcactgggtgcgtaatcgcctggaacagtaacaaattggactctaaagtctctgggaattataattaccgttatcgtctcttccgcaaaagtaacttgaagccttttgagagggacatttccacagagatatatcaagcaggtaataaaccatgcaacggcgtcgccggatttaattgttatttccccctcaggtcatactcctttaggccaacttacggcgttggccaccaaccatacagagtcgtagtgctttcctttgaactgctgcacgcccctgccactgtgtgtggcccaaaaaagagcaccaatttggtaaagaacaag

SEQ ID NO: 347 - protein, 666 aa, synthetic construct
  REGION 1..666: note = Synthetic
NITNLCPFDEVFNATKFASVYAWNRKRISNCVADYSVLYNLAPFFTFKCYGVSPTKLNDLCFTNVYADSFVIRGDEVRQIAPGQTGNIADYNYKLPDDFTGCVIAWNSNKLDSKVSGNYNYRYRLFRKSNLKPFERDISTEIYQAGNKPCNGVAGFNCYFPLRSYSFRPTYGVGHQPYRVVVLSFELLHAPATVCGPKKSTNLVKNKGSGGGGSGGGGSNITNLCPFDEVFNATKFASVYAWNRKRISNCVADYSVLYNLAPFFTFKCYGVSPTKLNDLCFTNVYADSFVIRGDEVRQIAPGQTGNIADYNYKLPDDFTGCVIAWNSNKLDSKVSGNYNYRYRLFRKSNLKPFERDISTEIYQAGNKPCNGVAGFNCYFPLRSYSFRPTYGVGHQPYRVVVLSFELLHAPATVCGPKKSTNLVKNKGSGGGGDGGGGSGDKTHTCPPCPAPELLGGPSVFLFPPKPKDTLMISRTPEVTCVVVDVSHEDPEVKFNWYVDGVEVHNAKTKPREEQYNSTYRVVSVLTVLHQDWLNGKEYKCKVSNKALPAPIEKTISKAKGQPREPQVYTLPPSREELTKNQVSLTCLVKGFYPSDIAVEWESNGQPENNYKTTPPVLDSDGSFFLYSKLTVDKSRWQQGNVFSCSVMHEALHNHYTQKSLSLSPGS

SEQ ID NO: 348 - DNA, 1998 bp, synthetic construct
  misc_feature 1..1998: note = Synthetic
  source 1..1998: mol_type = other DNA
aatatcacaaacttgtgcccatttgatgaggtcttcaatgccactaaatttgcatcagtatatgcatggaatcgtaaacggatatcaaattgcgttgctgactattcagtcctctataatcttgctccattctttacatttaaatgctacggagtatctcctactaagttgaatgacctttgcttcacaaatgtctatgctgacagttttgttattaggggtgacgaggtgcggcagattgcacccgggcaaacaggaaacatcgctgactacaattacaaacttcctgatgacttcactggttgtgtgattgcttggaattccaacaaactggattccaaagtgagtgggaattacaattacagatatagattgtttagaaaatctaacctcaagccattcgaacgggatataagcacagaaatctatcaggctgggaataaaccttgtaacggcgtagccgggttcaattgctattttccacttaggtcatacagctttaggcccacctacggggtgggacaccagccatatcgagtggtcgtactctctttcgagctgcttcatgcccccgcaaccgtgtgtggtcccaaaaaaagcaccaatctcgtcaagaataagggatcaggggggggcggatcaggcggtggaggcagcaacataactaatctttgtccattcgatgaagtctttaatgcaaccaaatttgcttctgtgtatgcatggaacaggaaaagaatatccaattgcgttgccgactatagcgtcctttacaatctcgccccctttttcacatttaagtgttatggggtctcccccactaagctgaatgatctgtgtttcaccaacgtttatgcagactcctttgttatacggggggatgaagttcgacaaatagcacccgggcagacagggaacatcgctgactacaattacaagcttccagatgacttcactgggtgcgtaatcgcctggaacagtaacaaattggactctaaagtctctgggaattataattaccgttatcgtctcttccgcaaaagtaacttgaagccttttgagagggacatttccacagagatatatcaagcaggtaataaaccatgcaacggcgtcgccggatttaattgttatttccccctcaggtcatactcctttaggccaacttacggcgttggccaccaaccatacagagtcgtagtgctttcctttgaactgctgcacgcccctgccactgtgtgtggcccaaaaaagagcaccaatttggtaaagaacaagggatccggcggcggcggtgacggtggtggcggctccggagacaagacccacacctgccccccttgtcctgcccctgagctgctgggcggaccctccgtgtttctgttcccccccaagcccaaggacaccctgatgatcagccggacccccgaggtcacctgcgtggtggtggacgtcagccacgaggacccagaggtcaagttcaattggtatgtggacggcgtggaggtgcacaacgccaagaccaagccccgggaggaacagtacaacagcacctaccgggtggtgtccgtgctgaccgtgctgcaccaggactggctgaacggcaaagaatacaagtgcaaggtgtccaacaaggccctgcctgcccccatcgagaaaaccatcagcaaggccaagggccagcccagagaaccccaggtgtacaccctgccccctagcagggaagagctgaccaagaaccaggtgtccctgacctgtctggtcaagggcttctaccccagcgatatcgccgtggagtgggagagcaacggccagcctgagaacaactacaagaccaccccccctgtgctggacagcgacggcagcttcttcctgtacagcaagctgaccgtggacaagagccggtggcagcagggcaacgtgtttagctgcagcgtgatgcacgaggccctgcacaaccactacacccagaagagcttaagcctgtcccctggcagt

SEQ ID NO: 349 - protein, 207 aa, synthetic construct
  REGION 1..207: note = Synthetic
NITNLCPFDEVFNATKFASVYAWNRKRISNCVADYSVLYNLAPFFTFKCYGVSPTKLNDLCFTNVYADSFVIRGDEVRQIAPGQTGNIADYNYKLPDDFTGCVIAWNSKNLDSKVSGNYNYRYRLFRKSNLKPFERDISTEIYQAGNRPCNGVAGFNCYFPLRSYSFRPTYGVGHQPYRVVVLSFELLHAPATVCGPKKSTNLVKNK

SEQ ID NO: 350 - DNA, 621 bp, synthetic construct
  misc_feature 1..621: note = Synthetic
  source 1..621: mol_type = other DNA
aatatcactaatctttgccccttcgatgaagtatttaacgctactaaatttgctagcgtatatgcctggaaccggaagagaataagcaactgtgttgcagactatagcgtgctttacaatcttgctccattctttaccttcaaatgttacggtgtgagccccaccaaactcaatgatctctgtttcacaaacgtgtacgcagatagtttcgttatacgcggggacgaagtacggcagatagcccctggccagacaggaaacatagccgattacaactacaaacttccagacgattttacagggtgtgtgatcgcttggaattcaaaaaacctggactccaaagtgagtggcaactataattacagataccgactgttccgcaaaagcaacttgaaacctttcgagcgagatatatcaaccgaaatctaccaagctggtaatagaccttgtaatggtgtggccggatttaactgctacttccctcttagatcctatagctttaggcctacatacggagtcgggcaccaaccctatagagtcgtggtgttgtcatttgaacttctccatgcacctgctactgtctgtggtccaaaaaagtccactaatcttgtaaaaaacaaa

SEQ ID NO: 351 - protein, 447 aa, synthetic construct
  REGION 1..447: note = Synthetic
NITNLCPFDEVFNATKFASVYAWNRKRISNCVADYSVLYNLAPFFTFKCYGVSPTKLNDLCFTNVYADSFVIRGDEVRQIAPGQTGNIADYNYKLPDDFTGCVIAWNSKNLDSKVSGNYNYRYRLFRKSNLKPFERDISTEIYQAGNRPCNGVAGFNCYFPLRSYSFRPTYGVGHQPYRVVVLSFELLHAPATVCGPKKSTNLVKNKGSGGGGDGGGGSGDKTHTCPPCPAPELLGGPSVFLFPPKPKDTLMISRTPEVTCVVVDVSHEDPEVKFNWYVDGVEVHNAKTKPREEQYNSTYRVVSVLTVLHQDWLNGKEYKCKVSNKALPAPIEKTISKAKGQPREPQVYTLPPSREELTKNQVSLTCLVKGFYPSDIAVEWESNGQPENNYKTTPPVLDSDGSFFLYSKLTVDKSRWQQGNVFSCSVMHEALHNHYTQKSLSLSPGS

SEQ ID NO: 352 - DNA, 1341 bp, synthetic construct
  misc_feature 1..1341: note = Synthetic
  source 1..1341: mol_type = other DNA
aatatcactaatctttgccccttcgatgaagtatttaacgctactaaatttgctagcgtatatgcctggaaccggaagagaataagcaactgtgttgcagactatagcgtgctttacaatcttgctccattctttaccttcaaatgttacggtgtgagccccaccaaactcaatgatctctgtttcacaaacgtgtacgcagatagtttcgttatacgcggggacgaagtacggcagatagcccctggccagacaggaaacatagccgattacaactacaaacttccagacgattttacagggtgtgtgatcgcttggaattcaaaaaacctggactccaaagtgagtggcaactataattacagataccgactgttccgcaaaagcaacttgaaacctttcgagcgagatatatcaaccgaaatctaccaagctggtaatagaccttgtaatggtgtggccggatttaactgctacttccctcttagatcctatagctttaggcctacatacggagtcgggcaccaaccctatagagtcgtggtgttgtcatttgaacttctccatgcacctgctactgtctgtggtccaaaaaagtccactaatcttgtaaaaaacaaaggatccggcggcggcggtgacggtggtggcggctccggagacaagacccacacctgccccccttgtcctgcccctgagctgctgggcggaccctccgtgtttctgttcccccccaagcccaaggacaccctgatgatcagccggacccccgaggtcacctgcgtggtggtggacgtcagccacgaggacccagaggtcaagttcaattggtatgtggacggcgtggaggtgcacaacgccaagaccaagccccgggaggaacagtacaacagcacctaccgggtggtgtccgtgctgaccgtgctgcaccaggactggctgaacggcaaagaatacaagtgcaaggtgtccaacaaggccctgcctgcccccatcgagaaaaccatcagcaaggccaagggccagcccagagaaccccaggtgtacaccctgccccctagcagggaagagctgaccaagaaccaggtgtccctgacctgtctggtcaagggcttctaccccagcgatatcgccgtggagtgggagagcaacggccagcctgagaacaactacaagaccaccccccctgtgctggacagcgacggcagcttcttcctgtacagcaagctgaccgtggacaagagccggtggcagcagggcaacgtgtttagctgcagcgtgatgcacgaggccctgcacaaccactacacccagaagagcttaagcctgtcccctggcagt

SEQ ID NO: 353 - protein, 426 aa, synthetic construct
  REGION 1..426: note = Synthetic
NITNLCPFDEVFNATKFASVYAWNRKRISNCVADYSVLYNLAPFFTFKCYGVSPTKLNDLCFTNVYADSFVIRGDEVRQIAPGQTGNIADYNYKLPDDFTGCVIAWNSNKLDSKVSGNYNYRYRLFRKSNLKPFERDISTEIYQAGNRPCNGVAGFNCYFPLRSYSFRPTYGVGHQPYRVVVLSFELLHAPATVCGPKKSTNLVKNKGSGGGGSGGGGSNITNLCPFDEVFNATKFASVYAWNRKRISNCVADYSVLYNLAPFFTFKCYGVSPTKLNDLCFTNVYADSFVIRGDEVRQIAPGQTGNIADYNYKLPDDFTGCVIAWNSNKLDSKVSGNYNYRYRLFRKSNLKPFERDISTEIYQAGNRPCNGVAGFNCYFPLRSYSFRPTYGVGHQPYRVVVLSFELLHAPATVCGPKKSTNLVKNK

SEQ ID NO: 354 - DNA, 1278 bp, synthetic construct
  misc_feature 1..1278: note = Synthetic
  source 1..1278: mol_type = other DNA
aatatcacaaacttgtgcccatttgatgaggtcttcaatgccactaaatttgcatcagtatatgcatggaatcgtaaacggatatcaaattgcgttgctgactattcagtcctctataatcttgctccattctttacatttaaatgctacggagtatctcctactaagttgaatgacctttgcttcacaaatgtctatgctgacagttttgttattaggggtgacgaggtgcggcagattgcacccgggcaaacaggaaacatcgctgactacaattacaaacttcctgatgacttcactggttgtgtgattgcttggaattccaacaaactggattccaaagtgagtgggaattacaattacagatatagattgtttagaaaatctaacctcaagccattcgaacgggatataagcacagaaatctatcaggctgggaatagaccttgtaacggcgtagccgggttcaattgctattttccacttaggtcatacagctttaggcccacctacggggtgggacaccagccatatcgagtggtcgtactctctttcgagctgcttcatgcccccgcaaccgtgtgtggtcccaaaaaaagcaccaatctcgtcaagaataagggatcaggggggggcggatcaggcggtggaggcagcaacataactaatctttgtccattcgatgaagtctttaatgcaaccaaatttgcttctgtgtatgcatggaacaggaaaagaatatccaattgcgttgccgactatagcgtcctttacaatctcgccccctttttcacatttaagtgttatggggtctcccccactaagctgaatgatctgtgtttcaccaacgtttatgcagactcctttgttatacggggggatgaagttcgacaaatagcacccgggcagacagggaacatcgctgactacaattacaagcttccagatgacttcactgggtgcgtaatcgcctggaacagtaacaaattggactctaaagtctctgggaattataattaccgttatcgtctcttccgcaaaagtaacttgaagccttttgagagggacatttccacagagatatatcaagcaggtaatagaccatgcaacggcgtcgccggatttaattgttatttccccctcaggtcatactcctttaggccaacttacggcgttggccaccaaccatacagagtcgtagtgctttcctttgaactgctgcacgcccctgccactgtgtgtggcccaaaaaagagcaccaatttggtaaagaacaag

SEQ ID NO: 355 - protein, 666 aa, synthetic construct
  REGION 1..666: note = Synthetic
NITNLCPFDEVFNATKFASVYAWNRKRISNCVADYSVLYNLAPFFTFKCYGVSPTKLNDLCFTNVYADSFVIRGDEVRQIAPGQTGNIADYNYKLPDDFTGCVIAWNSNKLDSKVSGNYNYRYRLFRKSNLKPFERDISTEIYQAGNRPCNGVAGFNCYFPLRSYSFRPTYGVGHQPYRVVVLSFELLHAPATVCGPKKSTNLVKNKGSGGGGSGGGGSNITNLCPFDEVFNATKFASVYAWNRKRISNCVADYSVLYNLAPFFTFKCYGVSPTKLNDLCFTNVYADSFVIRGDEVRQIAPGQTGNIADYNYKLPDDFTGCVIAWNSNKLDSKVSGNYNYRYRLFRKSNLKPFERDISTEIYQAGNRPCNGVAGFNCYFPLRSYSFRPTYGVGHQPYRVVVLSFELLHAPATVCGPKKSTNLVKNKGSGGGGDGGGGSGDKTHTCPPCPAPELLGGPSVFLFPPKPKDTLMISRTPEVTCVVVDVSHEDPEVKFNWYVDGVEVHNAKTKPREEQYNSTYRVVSVLTVLHQDWLNGKEYKCKVSNKALPAPIEKTISKAKGQPREPQVYTLPPSREELTKNQVSLTCLVKGFYPSDIAVEWESNGQPENNYKTTPPVLDSDGSFFLYSKLTVDKSRWQQGNVFSCSVMHEALHNHYTQKSLSLSPGS

SEQ ID NO: 356 - DNA, 1998 bp, synthetic construct
  misc_feature 1..1998: note = Synthetic
  source 1..1998: mol_type = other DNA
aatatcacaaacttgtgcccatttgatgaggtcttcaatgccactaaatttgcatcagtatatgcatggaatcgtaaacggatatcaaattgcgttgctgactattcagtcctctataatcttgctccattctttacatttaaatgctacggagtatctcctactaagttgaatgacctttgcttcacaaatgtctatgctgacagttttgttattaggggtgacgaggtgcggcagattgcacccgggcaaacaggaaacatcgctgactacaattacaaacttcctgatgacttcactggttgtgtgattgcttggaattccaacaaactggattccaaagtgagtgggaattacaattacagatatagattgtttagaaaatctaacctcaagccattcgaacgggatataagcacagaaatctatcaggctgggaatagaccttgtaacggcgtagccgggttcaattgctattttccacttaggtcatacagctttaggcccacctacggggtgggacaccagccatatcgagtggtcgtactctctttcgagctgcttcatgcccccgcaaccgtgtgtggtcccaaaaaaagcaccaatctcgtcaagaataagggatcaggggggggcggatcaggcggtggaggcagcaacataactaatctttgtccattcgatgaagtctttaatgcaaccaaatttgcttctgtgtatgcatggaacaggaaaagaatatccaattgcgttgccgactatagcgtcctttacaatctcgccccctttttcacatttaagtgttatggggtctcccccactaagctgaatgatctgtgtttcaccaacgtttatgcagactcctttgttatacggggggatgaagttcgacaaatagcacccgggcagacagggaacatcgctgactacaattacaagcttccagatgacttcactgggtgcgtaatcgcctggaacagtaacaaattggactctaaagtctctgggaattataattaccgttatcgtctcttccgcaaaagtaacttgaagccttttgagagggacatttccacagagatatatcaagcaggtaatagaccatgcaacggcgtcgccggatttaattgttatttccccctcaggtcatactcctttaggccaacttacggcgttggccaccaaccatacagagtcgtagtgctttcctttgaactgctgcacgcccctgccactgtgtgtggcccaaaaaagagcaccaatttggtaaagaacaagggatccggcggcggcggtgacggtggtggcggctccggagacaagacccacacctgccccccttgtcctgcccctgagctgctgggcggaccctccgtgtttctgttcccccccaagcccaaggacaccctgatgatcagccggacccccgaggtcacctgcgtggtggtggacgtcagccacgaggacccagaggtcaagttcaattggtatgtggacggcgtggaggtgcacaacgccaagaccaagccccgggaggaacagtacaacagcacctaccgggtggtgtccgtgctgaccgtgctgcaccaggactggctgaacggcaaagaatacaagtgcaaggtgtccaacaaggccctgcctgcccccatcgagaaaaccatcagcaaggccaagggccagcccagagaaccccaggtgtacaccctgccccctagcagggaagagctgaccaagaaccaggtgtccctgacctgtctggtcaagggcttctaccccagcgatatcgccgtggagtgggagagcaacggccagcctgagaacaactacaagaccaccccccctgtgctggacagcgacggcagcttcttcctgtacagcaagctgaccgtggacaagagccggtggcagcagggcaacgtgtttagctgcagcgtgatgcacgaggccctgcacaaccactacacccagaagagcttaagcctgtcccctggcagt

SEQ ID NO: 357 - protein, 207 aa, synthetic construct
  REGION 1..207: note = Synthetic
NITNLCPFDEVFNATKFASVYAWNRKRISNCVADYSVLYNLAPFFTFKCYGVSPTKLNDLCFTNVYADSFVIRGDEVRQIAPGQTGNIADYNYKLPDDFTGCVIAWNSKNLDSKVSGNYNYRYRLFRKSNLKPFERDISTEIYQAGNRPCNGVKGFNCYFPLRSYSFRPTYGVGHQPYRVVVLSFELLHAPATVCGPKKSTNLVKNK

SEQ ID NO: 358 - DNA, 621 bp, synthetic construct
  misc_feature 1..621: note = Synthetic
  source 1..621: mol_type = other DNA
aatatcactaatctttgccccttcgatgaagtatttaacgctactaaatttgctagcgtatatgcctggaaccggaagagaataagcaactgtgttgcagactatagcgtgctttacaatcttgctccattctttaccttcaaatgttacggtgtgagccccaccaaactcaatgatctctgtttcacaaacgtgtacgcagatagtttcgttatacgcggggacgaagtacggcagatagcccctggccagacaggaaacatagccgattacaactacaaacttccagacgattttacagggtgtgtgatcgcttggaattcaaaaaacctggactccaaagtgagtggcaactataattacagataccgactgttccgcaaaagcaacttgaaacctttcgagcgagatatatcaaccgaaatctaccaagctggtaatagaccttgtaatggtgtgaagggatttaactgctacttccctcttagatcctatagctttaggcctacatacggagtcgggcaccaaccctatagagtcgtggtgttgtcatttgaacttctccatgcacctgctactgtctgtggtccaaaaaagtccactaatcttgtaaaaaacaaa

SEQ ID NO: 359 - protein, 447 aa, synthetic construct
  REGION 1..447: note = Synthetic
NITNLCPFDEVFNATKFASVYAWNRKRISNCVADYSVLYNLAPFFTFKCYGVSPTKLNDLCFTNVYADSFVIRGDEVRQIAPGQTGNIADYNYKLPDDFTGCVIAWNSKNLDSKVSGNYNYRYRLFRKSNLKPFERDISTEIYQAGNRPCNGVKGFNCYFPLRSYSFRPTYGVGHQPYRVVVLSFELLHAPATVCGPKKSTNLVKNKGSGGGGDGGGGSGDKTHTCPPCPAPELLGGPSVFLFPPKPKDTLMISRTPEVTCVVVDVSHEDPEVKFNWYVDGVEVHNAKTKPREEQYNSTYRVVSVLTVLHQDWLNGKEYKCKVSNKALPAPIEKTISKAKGQPREPQVYTLPPSREELTKNQVSLTCLVKGFYPSDIAVEWESNGQPENNYKTTPPVLDSDGSFFLYSKLTVDKSRWQQGNVFSCSVMHEALHNHYTQKSLSLSPGS

SEQ ID NO: 360 - DNA, 1341 bp, synthetic construct
  misc_feature 1..1341: note = Synthetic
  source 1..1341: mol_type = other DNA
aatatcactaatctttgccccttcgatgaagtatttaacgctactaaatttgctagcgtatatgcctggaaccggaagagaataagcaactgtgttgcagactatagcgtgctttacaatcttgctccattctttaccttcaaatgttacggtgtgagccccaccaaactcaatgatctctgtttcacaaacgtgtacgcagatagtttcgttatacgcggggacgaagtacggcagatagcccctggccagacaggaaacatagccgattacaactacaaacttccagacgattttacagggtgtgtgatcgcttggaattcaaaaaacctggactccaaagtgagtggcaactataattacagataccgactgttccgcaaaagcaacttgaaacctttcgagcgagatatatcaaccgaaatctaccaagctggtaatagaccttgtaatggtgtgaagggatttaactgctacttccctcttagatcctatagctttaggcctacatacggagtcgggcaccaaccctatagagtcgtggtgttgtcatttgaacttctccatgcacctgctactgtctgtggtccaaaaaagtccactaatcttgtaaaaaacaaaggatccggcggcggcggtgacggtggtggcggctccggagacaagacccacacctgccccccttgtcctgcccctgagctgctgggcggaccctccgtgtttctgttcccccccaagcccaaggacaccctgatgatcagccggacccccgaggtcacctgcgtggtggtggacgtcagccacgaggacccagaggtcaagttcaattggtatgtggacggcgtggaggtgcacaacgccaagaccaagccccgggaggaacagtacaacagcacctaccgggtggtgtccgtgctgaccgtgctgcaccaggactggctgaacggcaaagaatacaagtgcaaggtgtccaacaaggccctgcctgcccccatcgagaaaaccatcagcaaggccaagggccagcccagagaaccccaggtgtacaccctgccccctagcagggaagagctgaccaagaaccaggtgtccctgacctgtctggtcaagggcttctaccccagcgatatcgccgtggagtgggagagcaacggccagcctgagaacaactacaagaccaccccccctgtgctggacagcgacggcagcttcttcctgtacagcaagctgaccgtggacaagagccggtggcagcagggcaacgtgtttagctgcagcgtgatgcacgaggccctgcacaaccactacacccagaagagcttaagcctgtcccctggcagt

SEQ ID NO: 361 - protein, 426 aa, synthetic construct
  REGION 1..426: note = Synthetic
NITNLCPFDEVFNATKFASVYAWNRKRISNCVADYSVLYNLAPFFTFKCYGVSPTKLNDLCFTNVYADSFVIRGDEVRQIAPGQTGNIADYNYKLPDDFTGCVIAWNSNKLDSKVSGNYNYRYRLFRKSNLKPFERDISTEIYQAGNRPCNGVKGFNCYFPLRSYSFRPTYGVGHQPYRVVVLSFELLHAPATVCGPKKSTNLVKNKGSGGGGSGGGGSNITNLCPFDEVFNATKFASVYAWNRKRISNCVADYSVLYNLAPFFTFKCYGVSPTKLNDLCFTNVYADSFVIRGDEVRQIAPGQTGNIADYNYKLPDDFTGCVIAWNSNKLDSKVSGNYNYRYRLFRKSNLKPFERDISTEIYQAGNRPCNGVKGFNCYFPLRSYSFRPTYGVGHQPYRVVVLSFELLHAPATVCGPKKSTNLVKNK

SEQ ID NO: 362 - DNA, 1278 bp, synthetic construct
  misc_feature 1..1278: note = Synthetic
  source 1..1278: mol_type = other DNA
aatatcacaaacttgtgcccatttgatgaggtcttcaatgccactaaatttgcatcagtatatgcatggaatcgtaaacggatatcaaattgcgttgctgactattcagtcctctataatcttgctccattctttacatttaaatgctacggagtatctcctactaagttgaatgacctttgcttcacaaatgtctatgctgacagttttgttattaggggtgacgaggtgcggcagattgcacccgggcaaacaggaaacatcgctgactacaattacaaacttcctgatgacttcactggttgtgtgattgcttggaattccaacaaactggattccaaagtgagtgggaattacaattacagatatagattgtttagaaaatctaacctcaagccattcgaacgggatataagcacagaaatctatcaggctgggaatagaccttgtaacggcgtaaaggggttcaattgctattttccacttaggtcatacagctttaggcccacctacggggtgggacaccagccatatcgagtggtcgtactctctttcgagctgcttcatgcccccgcaaccgtgtgtggtcccaaaaaaagcaccaatctcgtcaagaataagggatcaggggggggcggatcaggcggtggaggcagcaacataactaatctttgtccattcgatgaagtctttaatgcaaccaaatttgcttctgtgtatgcatggaacaggaaaagaatatccaattgcgttgccgactatagcgtcctttacaatctcgccccctttttcacatttaagtgttatggggtctcccccactaagctgaatgatctgtgtttcaccaacgtttatgcagactcctttgttatacggggggatgaagttcgacaaatagcacccgggcagacagggaacatcgctgactacaattacaagcttccagatgacttcactgggtgcgtaatcgcctggaacagtaacaaattggactctaaagtctctgggaattataattaccgttatcgtctcttccgcaaaagtaacttgaagccttttgagagggacatttccacagagatatatcaagcaggtaatagaccatgcaacggcgtcaagggatttaattgttatttccccctcaggtcatactcctttaggccaacttacggcgttggccaccaaccatacagagtcgtagtgctttcctttgaactgctgcacgcccctgccactgtgtgtggcccaaaaaagagcaccaatttggtaaagaacaag

SEQ ID NO: 363 - protein, 666 aa, synthetic construct
  REGION 1..666: note = Synthetic
NITNLCPFDEVFNATKFASVYAWNRKRISNCVADYSVLYNLAPFFTFKCYGVSPTKLNDLCFTNVYADSFVIRGDEVRQIAPGQTGNIADYNYKLPDDFTGCVIAWNSNKLDSKVSGNYNYRYRLFRKSNLKPFERDISTEIYQAGNRPCNGVKGFNCYFPLRSYSFRPTYGVGHQPYRVVVLSFELLHAPATVCGPKKSTNLVKNKGSGGGGSGGGGSNITNLCPFDEVFNATKFASVYAWNRKRISNCVADYSVLYNLAPFFTFKCYGVSPTKLNDLCFTNVYADSFVIRGDEVRQIAPGQTGNIADYNYKLPDDFTGCVIAWNSNKLDSKVSGNYNYRYRLFRKSNLKPFERDISTEIYQAGNRPCNGVKGFNCYFPLRSYSFRPTYGVGHQPYRVVVLSFELLHAPATVCGPKKSTNLVKNKGSGGGGDGGGGSGDKTHTCPPCPAPELLGGPSVFLFPPKPKDTLMISRTPEVTCVVVDVSHEDPEVKFNWYVDGVEVHNAKTKPREEQYNSTYRVVSVLTVLHQDWLNGKEYKCKVSNKALPAPIEKTISKAKGQPREPQVYTLPPSREELTKNQVSLTCLVKGFYPSDIAVEWESNGQPENNYKTTPPVLDSDGSFFLYSKLTVDKSRWQQGNVFSCSVMHEALHNHYTQKSLSLSPGS

SEQ ID NO: 364 - DNA, 1998 bp, synthetic construct
  misc_feature 1..1998: note = Synthetic
  source 1..1998: mol_type = other DNA
aatatcacaaacttgtgcccatttgatgaggtcttcaatgccactaaatttgcatcagtatatgcatggaatcgtaaacggatatcaaattgcgttgctgactattcagtcctctataatcttgctccattctttacatttaaatgctacggagtatctcctactaagttgaatgacctttgcttcacaaatgtctatgctgacagttttgttattaggggtgacgaggtgcggcagattgcacccgggcaaacaggaaacatcgctgactacaattacaaacttcctgatgacttcactggttgtgtgattgcttggaattccaacaaactggattccaaagtgagtgggaattacaattacagatatagattgtttagaaaatctaacctcaagccattcgaacgggatataagcacagaaatctatcaggctgggaatagaccttgtaacggcgtaaaggggttcaattgctattttccacttaggtcatacagctttaggcccacctacggggtgggacaccagccatatcgagtggtcgtactctctttcgagctgcttcatgcccccgcaaccgtgtgtggtcccaaaaaaagcaccaatctcgtcaagaataagggatcaggggggggcggatcaggcggtggaggcagcaacataactaatctttgtccattcgatgaagtctttaatgcaaccaaatttgcttctgtgtatgcatggaacaggaaaagaatatccaattgcgttgccgactatagcgtcctttacaatctcgccccctttttcacatttaagtgttatggggtctcccccactaagctgaatgatctgtgtttcaccaacgtttatgcagactcctttgttatacggggggatgaagttcgacaaatagcacccgggcagacagggaacatcgctgactacaattacaagcttccagatgacttcactgggtgcgtaatcgcctggaacagtaacaaattggactctaaagtctctgggaattataattaccgttatcgtctcttccgcaaaagtaacttgaagccttttgagagggacatttccacagagatatatcaagcaggtaatagaccatgcaacggcgtcaagggatttaattgttatttccccctcaggtcatactcctttaggccaacttacggcgttggccaccaaccatacagagtcgtagtgctttcctttgaactgctgcacgcccctgccactgtgtgtggcccaaaaaagagcaccaatttggtaaagaacaagggatccggcggcggcggtgacggtggtggcggctccggagacaagacccacacctgccccccttgtcctgcccctgagctgctgggcggaccctccgtgtttctgttcccccccaagcccaaggacaccctgatgatcagccggacccccgaggtcacctgcgtggtggtggacgtcagccacgaggacccagaggtcaagttcaattggtatgtggacggcgtggaggtgcacaacgccaagaccaagccccgggaggaacagtacaacagcacctaccgggtggtgtccgtgctgaccgtgctgcaccaggactggctgaacggcaaagaatacaagtgcaaggtgtccaacaaggccctgcctgcccccatcgagaaaaccatcagcaaggccaagggccagcccagagaaccccaggtgtacaccctgccccctagcagggaagagctgaccaagaaccaggtgtccctgacctgtctggtcaagggcttctaccccagcgatatcgccgtggagtgggagagcaacggccagcctgagaacaactacaagaccaccccccctgtgctggacagcgacggcagcttcttcctgtacagcaagctgaccgtggacaagagccggtggcagcagggcaacgtgtttagctgcagcgtgatgcacgaggccctgcacaaccactacacccagaagagcttaagcctgtcccctggcagt

SEQ ID NO: 365 - protein, 249 aa, synthetic construct
  REGION 1..249: note = Synthetic
RVQPTESIVRFPNITNLCPFGEVFNATRFASVYAWNRKRISNCVADYSVLYNSASFSTFKCYGVSPTKLNDLCFTNVYADSFVIRGDEVRQIAPGQTGKIADYNYKLPDDFTGCVIAWNSNNLDSKVGGNYNYLYRLFRKSNLKPFERDISTEIYQAGSTPCNGVEGFNCYFPLQSYGFQPTNGVGYQPYRVVVLSFELLHAPATVCGPKKSTNLVKNKCVNFNFNGLTGTGVLTESNKKFLPFQQFGR

SEQ ID NO: 366 - protein, 248 aa, synthetic construct
  REGION 1..248: note = Synthetic
RVQPTESIVRFPNITNLCPFGEVFNATRFASVYAWNRKRISNCVADYSVLYNSASFSTFKCYGVSPTKLNDLCFTNVYADSFVIRGDEVRQIAPGQTGKIADYNYKLPDDFTGCVIAWNSNNLDSKVGGNYNYLYRLFRKSNLKPFERDISTEIYQAGSTPCNGVEGFNCYFPLQSYGFQPTNGVGYQPYRVVVLSFELLHAPATVCGPKKSTNLVKNKCVNFNFNGLTGTGVLTESNKKFLPFQQFG

SEQ ID NO: 367 - protein, 247 aa, synthetic construct
  REGION 1..247: note = Synthetic
RVQPTESIVRFPNITNLCPFGEVFNATRFASVYAWNRKRISNCVADYSVLYNSASFSTFKCYGVSPTKLNDLCFTNVYADSFVIRGDEVRQIAPGQTGKIADYNYKLPDDFTGCVIAWNSNNLDSKVGGNYNYLYRLFRKSNLKPFERDISTEIYQAGSTPCNGVEGFNCYFPLQSYGFQPTNGVGYQPYRVVVLSFELLHAPATVCGPKKSTNLVKNKCVNFNFNGLTGTGVLTESNKKFLPFQQF

SEQ ID NO: 368 - protein, 246 aa, synthetic construct
  REGION 1..246: note = Synthetic
RVQPTESIVRFPNITNLCPFGEVFNATRFASVYAWNRKRISNCVADYSVLYNSASFSTFKCYGVSPTKLNDLCFTNVYADSFVIRGDEVRQIAPGQTGKIADYNYKLPDDFTGCVIAWNSNNLDSKVGGNYNYLYRLFRKSNLKPFERDISTEIYQAGSTPCNGVEGFNCYFPLQSYGFQPTNGVGYQPYRVVVLSFELLHAPATVCGPKKSTNLVKNKCVNFNFNGLTGTGVLTESNKKFLPFQQ

SEQ ID NO: 369 - protein, 245 aa, synthetic construct
  REGION 1..245: note = Synthetic
RVQPTESIVRFPNITNLCPFGEVFNATRFASVYAWNRKRISNCVADYSVLYNSASFSTFKCYGVSPTKLNDLCFTNVYADSFVIRGDEVRQIAPGQTGKIADYNYKLPDDFTGCVIAWNSNNLDSKVGGNYNYLYRLFRKSNLKPFERDISTEIYQAGSTPCNGVEGFNCYFPLQSYGFQPTNGVGYQPYRVVVLSFELLHAPATVCGPKKSTNLVKNKCVNFNFNGLTGTGVLTESNKKFLPFQ

SEQ ID NO: 370 - protein, 244 aa, synthetic construct
  REGION 1..244: note = Synthetic
RVQPTESIVRFPNITNLCPFGEVFNATRFASVYAWNRKRISNCVADYSVLYNSASFSTFKCYGVSPTKLNDLCFTNVYADSFVIRGDEVRQIAPGQTGKIADYNYKLPDDFTGCVIAWNSNNLDSKVGGNYNYLYRLFRKSNLKPFERDISTEIYQAGSTPCNGVEGFNCYFPLQSYGFQPTNGVGYQPYRVVVLSFELLHAPATVCGPKKSTNLVKNKCVNFNFNGLTGTGVLTESNKKFLPF

SEQ ID NO: 371 - protein, 243 aa, synthetic construct
  REGION 1..243: note = Synthetic
RVQPTESIVRFPNITNLCPFGEVFNATRFASVYAWNRKRISNCVADYSVLYNSASFSTFKCYGVSPTKLNDLCFTNVYADSFVIRGDEVRQIAPGQTGKIADYNYKLPDDFTGCVIAWNSNNLDSKVGGNYNYLYRLFRKSNLKPFERDISTEIYQAGSTPCNGVEGFNCYFPLQSYGFQPTNGVGYQPYRVVVLSFELLHAPATVCGPKKSTNLVKNKCVNFNFNGLTGTGVLTESNKKFLP

SEQ ID NO: 372 - protein, 242 aa, synthetic construct
  REGION 1..242: note = Synthetic
RVQPTESIVRFPNITNLCPFGEVFNATRFASVYAWNRKRISNCVADYSVLYNSASFSTFKCYGVSPTKLNDLCFTNVYADSFVIRGDEVRQIAPGQTGKIADYNYKLPDDFTGCVIAWNSNNLDSKVGGNYNYLYRLFRKSNLKPFERDISTEIYQAGSTPCNGVEGFNCYFPLQSYGFQPTNGVGYQPYRVVVLSFELLHAPATVCGPKKSTNLVKNKCVNFNFNGLTGTGVLTESNKKFL

SEQ ID NO: 373 - protein, 241 aa, synthetic construct
  REGION 1..241: note = Synthetic
RVQPTESIVRFPNITNLCPFGEVFNATRFASVYAWNRKRISNCVADYSVLYNSASFSTFKCYGVSPTKLNDLCFTNVYADSFVIRGDEVRQIAPGQTGKIADYNYKLPDDFTGCVIAWNSNNLDSKVGGNYNYLYRLFRKSNLKPFERDISTEIYQAGSTPCNGVEGFNCYFPLQSYGFQPTNGVGYQPYRVVVLSFELLHAPATVCGPKKSTNLVKNKCVNFNFNGLTGTGVLTESNKKF

SEQ ID NO: 374 - protein, 240 aa, synthetic construct
  REGION 1..240: note = Synthetic
RVQPTESIVRFPNITNLCPFGEVFNATRFASVYAWNRKRISNCVADYSVLYNSASFSTFKCYGVSPTKLNDLCFTNVYADSFVIRGDEVRQIAPGQTGKIADYNYKLPDDFTGCVIAWNSNNLDSKVGGNYNYLYRLFRKSNLKPFERDISTEIYQAGSTPCNGVEGFNCYFPLQSYGFQPTNGVGYQPYRVVVLSFELLHAPATVCGPKKSTNLVKNKCVNFNFNGLTGTGVLTESNKK

SEQ ID NO: 375 - protein, 239 aa, synthetic construct
  REGION 1..239: note = Synthetic
RVQPTESIVRFPNITNLCPFGEVFNATRFASVYAWNRKRISNCVADYSVLYNSASFSTFKCYGVSPTKLNDLCFTNVYADSFVIRGDEVRQIAPGQTGKIADYNYKLPDDFTGCVIAWNSNNLDSKVGGNYNYLYRLFRKSNLKPFERDISTEIYQAGSTPCNGVEGFNCYFPLQSYGFQPTNGVGYQPYRVVVLSFELLHAPATVCGPKKSTNLVKNKCVNFNFNGLTGTGVLTESNK

SEQ ID NO: 376 - protein, 238 aa, synthetic construct
  REGION 1..238: note = Synthetic
RVQPTESIVRFPNITNLCPFGEVFNATRFASVYAWNRKRISNCVADYSVLYNSASFSTFKCYGVSPTKLNDLCFTNVYADSFVIRGDEVRQIAPGQTGKIADYNYKLPDDFTGCVIAWNSNNLDSKVGGNYNYLYRLFRKSNLKPFERDISTEIYQAGSTPCNGVEGFNCYFPLQSYGFQPTNGVGYQPYRVVVLSFELLHAPATVCGPKKSTNLVKNKCVNFNFNGLTGTGVLTESN

SEQ ID NO: 377 - protein, 237 aa, synthetic construct; identical to SEQ ID NO: 37
  REGION 1..237: note = Synthetic

SEQ ID NO: 378 - protein, 236 aa, synthetic construct
  REGION 1..236: note = Synthetic
RVQPTESIVRFPNITNLCPFGEVFNATRFASVYAWNRKRISNCVADYSVLYNSASFSTFKCYGVSPTKLNDLCFTNVYADSFVIRGDEVRQIAPGQTGKIADYNYKLPDDFTGCVIAWNSNNLDSKVGGNYNYLYRLFRKSNLKPFERDISTEIYQAGSTPCNGVEGFNCYFPLQSYGFQPTNGVGYQPYRVVVLSFELLHAPATVCGPKKSTNLVKNKCVNFNFNGLTGTGVLTE

SEQ ID NO: 379 - protein, 235 aa, synthetic construct
  REGION 1..235: note = Synthetic
RVQPTESIVRFPNITNLCPFGEVFNATRFASVYAWNRKRISNCVADYSVLYNSASFSTFKCYGVSPTKLNDLCFTNVYADSFVIRGDEVRQIAPGQTGKIADYNYKLPDDFTGCVIAWNSNNLDSKVGGNYNYLYRLFRKSNLKPFERDISTEIYQAGSTPCNGVEGFNCYFPLQSYGFQPTNGVGYQPYRVVVLSFELLHAPATVCGPKKSTNLVKNKCVNFNFNGLTGTGVLT

SEQ ID NO: 380 - protein, 234 aa, synthetic construct
  REGION 1..234: note = Synthetic
RVQPTESIVRFPNITNLCPFGEVFNATRFASVYAWNRKRISNCVADYSVLYNSASFSTFKCYGVSPTKLNDLCFTNVYADSFVIRGDEVRQIAPGQTGKIADYNYKLPDDFTGCVIAWNSNNLDSKVGGNYNYLYRLFRKSNLKPFERDISTEIYQAGSTPCNGVEGFNCYFPLQSYGFQPTNGVGYQPYRVVVLSFELLHAPATVCGPKKSTNLVKNKCVNFNFNGLTGTGVL

SEQ ID NO: 381 - protein, 233 aa, synthetic construct
  REGION 1..233: note = Synthetic
RVQPTESIVRFPNITNLCPFGEVFNATRFASVYAWNRKRISNCVADYSVLYNSASFSTFKCYGVSPTKLNDLCFTNVYADSFVIRGDEVRQIAPGQTGKIADYNYKLPDDFTGCVIAWNSNNLDSKVGGNYNYLYRLFRKSNLKPFERDISTEIYQAGSTPCNGVEGFNCYFPLQSYGFQPTNGVGYQPYRVVVLSFELLHAPATVCGPKKSTNLVKNKCVNFNFNGLTGTGV

SEQ ID NO: 382 - protein, 232 aa, synthetic construct
  REGION 1..232: note = Synthetic
RVQPTESIVRFPNITNLCPFGEVFNATRFASVYAWNRKRISNCVADYSVLYNSASFSTFKCYGVSPTKLNDLCFTNVYADSFVIRGDEVRQIAPGQTGKIADYNYKLPDDFTGCVIAWNSNNLDSKVGGNYNYLYRLFRKSNLKPFERDISTEIYQAGSTPCNGVEGFNCYFPLQSYGFQPTNGVGYQPYRVVVLSFELLHAPATVCGPKKSTNLVKNKCVNFNFNGLTGTG

SEQ ID NO: 383 - protein, 231 aa, synthetic construct
  REGION 1..231: note = Synthetic
RVQPTESIVRFPNITNLCPFGEVFNATRFASVYAWNRKRISNCVADYSVLYNSASFSTFKCYGVSPTKLNDLCFTNVYADSFVIRGDEVRQIAPGQTGKIADYNYKLPDDFTGCVIAWNSNNLDSKVGGNYNYLYRLFRKSNLKPFERDISTEIYQAGSTPCNGVEGFNCYFPLQSYGFQPTNGVGYQPYRVVVLSFELLHAPATVCGPKKSTNLVKNKCVNFNFNGLTGT

SEQ ID NO: 384 - protein, 230 aa, synthetic construct
  REGION 1..230: note = Synthetic
RVQPTESIVRFPNITNLCPFGEVFNATRFASVYAWNRKRISNCVADYSVLYNSASFSTFKCYGVSPTKLNDLCFTNVYADSFVIRGDEVRQIAPGQTGKIADYNYKLPDDFTGCVIAWNSNNLDSKVGGNYNYLYRLFRKSNLKPFERDISTEIYQAGSTPCNGVEGFNCYFPLQSYGFQPTNGVGYQPYRVVVLSFELLHAPATVCGPKKSTNLVKNKCVNFNFNGLTG

SEQ ID NO: 385 - protein, 229 aa, synthetic construct
  REGION 1..229: note = Synthetic
RVQPTESIVRFPNITNLCPFGEVFNATRFASVYAWNRKRISNCVADYSVLYNSASFSTFKCYGVSPTKLNDLCFTNVYADSFVIRGDEVRQIAPGQTGKIADYNYKLPDDFTGCVIAWNSNNLDSKVGGNYNYLYRLFRKSNLKPFERDISTEIYQAGSTPCNGVEGFNCYFPLQSYGFQPTNGVGYQPYRVVVLSFELLHAPATVCGPKKSTNLVKNKCVNFNFNGLT

SEQ ID NO: 386 - protein, 228 aa, synthetic construct
  REGION 1..228: note = Synthetic
RVQPTESIVRFPNITNLCPFGEVFNATRFASVYAWNRKRISNCVADYSVLYNSASFSTFKCYGVSPTKLNDLCFTNVYADSFVIRGDEVRQIAPGQTGKIADYNYKLPDDFTGCVIAWNSNNLDSKVGGNYNYLYRLFRKSNLKPFERDISTEIYQAGSTPCNGVEGFNCYFPLQSYGFQPTNGVGYQPYRVVVLSFELLHAPATVCGPKKSTNLVKNKCVNFNFNGL

SEQ ID NO: 387 - protein, 227 aa, synthetic construct
  REGION 1..227: note = Synthetic
RVQPTESIVRFPNITNLCPFGEVFNATRFASVYAWNRKRISNCVADYSVLYNSASFSTFKCYGVSPTKLNDLCFTNVYADSFVIRGDEVRQIAPGQTGKIADYNYKLPDDFTGCVIAWNSNNLDSKVGGNYNYLYRLFRKSNLKPFERDISTEIYQAGSTPCNGVEGFNCYFPLQSYGFQPTNGVGYQPYRVVVLSFELLHAPATVCGPKKSTNLVKNKCVNFNFNG

SEQ ID NO: 388 - protein, 226 aa, synthetic construct
  REGION 1..226: note = Synthetic
RVQPTESIVRFPNITNLCPFGEVFNATRFASVYAWNRKRISNCVADYSVLYNSASFSTFKCYGVSPTKLNDLCFTNVYADSFVIRGDEVRQIAPGQTGKIADYNYKLPDDFTGCVIAWNSNNLDSKVGGNYNYLYRLFRKSNLKPFERDISTEIYQAGSTPCNGVEGFNCYFPLQSYGFQPTNGVGYQPYRVVVLSFELLHAPATVCGPKKSTNLVKNKCVNFNFN

SEQ ID NO: 389 - protein, 225 aa, synthetic construct
  REGION 1..225: note = Synthetic
RVQPTESIVRFPNITNLCPFGEVFNATRFASVYAWNRKRISNCVADYSVLYNSASFSTFKCYGVSPTKLNDLCFTNVYADSFVIRGDEVRQIAPGQTGKIADYNYKLPDDFTGCVIAWNSNNLDSKVGGNYNYLYRLFRKSNLKPFERDISTEIYQAGSTPCNGVEGFNCYFPLQSYGFQPTNGVGYQPYRVVVLSFELLHAPATVCGPKKSTNLVKNKCVNFNF

SEQ ID NO: 390 - protein, 224 aa, synthetic construct
  REGION 1..224: note = Synthetic
RVQPTESIVRFPNITNLCPFGEVFNATRFASVYAWNRKRISNCVADYSVLYNSASFSTFKCYGVSPTKLNDLCFTNVYADSFVIRGDEVRQIAPGQTGKIADYNYKLPDDFTGCVIAWNSNNLDSKVGGNYNYLYRLFRKSNLKPFERDISTEIYQAGSTPCNGVEGFNCYFPLQSYGFQPTNGVGYQPYRVVVLSFELLHAPATVCGPKKSTNLVKNKCVNFN

SEQ ID NO: 391 - protein, 223 aa, synthetic construct
  REGION 1..223: note = Synthetic
RVQPTESIVRFPNITNLCPFGEVFNATRFASVYAWNRKRISNCVADYSVLYNSASFSTFKCYGVSPTKLNDLCFTNVYADSFVIRGDEVRQIAPGQTGKIADYNYKLPDDFTGCVIAWNSNNLDSKVGGNYNYLYRLFRKSNLKPFERDISTEIYQAGSTPCNGVEGFNCYFPLQSYGFQPTNGVGYQPYRVVVLSFELLHAPATVCGPKKSTNLVKNKCVNF

SEQ ID NO: 392 - protein, 222 aa, synthetic construct
  REGION 1..222: note = Synthetic
RVQPTESIVRFPNITNLCPFGEVFNATRFASVYAWNRKRISNCVADYSVLYNSASFSTFKCYGVSPTKLNDLCFTNVYADSFVIRGDEVRQIAPGQTGKIADYNYKLPDDFTGCVIAWNSNNLDSKVGGNYNYLYRLFRKSNLKPFERDISTEIYQAGSTPCNGVEGFNCYFPLQSYGFQPTNGVGYQPYRVVVLSFELLHAPATVCGPKKSTNLVKNKCVN

SEQ ID NO: 393 - protein, 221 aa, synthetic construct
  REGION 1..221: note = Synthetic
RVQPTESIVRFPNITNLCPFGEVFNATRFASVYAWNRKRISNCVADYSVLYNSASFSTFKCYGVSPTKLNDLCFTNVYADSFVIRGDEVRQIAPGQTGKIADYNYKLPDDFTGCVIAWNSNNLDSKVGGNYNYLYRLFRKSNLKPFERDISTEIYQAGSTPCNGVEGFNCYFPLQSYGFQPTNGVGYQPYRVVVLSFELLHAPATVCGPKKSTNLVKNKCV

SEQ ID NO: 394 - protein, 220 aa, synthetic construct
  REGION 1..220: note = Synthetic
RVQPTESIVRFPNITNLCPFGEVFNATRFASVYAWNRKRISNCVADYSVLYNSASFSTFKCYGVSPTKLNDLCFTNVYADSFVIRGDEVRQIAPGQTGKIADYNYKLPDDFTGCVIAWNSNNLDSKVGGNYNYLYRLFRKSNLKPFERDISTEIYQAGSTPCNGVEGFNCYFPLQSYGFQPTNGVGYQPYRVVVLSFELLHAPATVCGPKKSTNLVKNKC

SEQ ID NO: 395 - protein, 219 aa, synthetic construct
  REGION 1..219: note = Synthetic
RVQPTESIVRFPNITNLCPFGEVFNATRFASVYAWNRKRISNCVADYSVLYNSASFSTFKCYGVSPTKLNDLCFTNVYADSFVIRGDEVRQIAPGQTGKIADYNYKLPDDFTGCVIAWNSNNLDSKVGGNYNYLYRLFRKSNLKPFERDISTEIYQAGSTPCNGVEGFNCYFPLQSYGFQPTNGVGYQPYRVVVLSFELLHAPATVCGPKKSTNLVKNK

SEQ ID NO: 396 - protein, 218 aa, synthetic construct
  REGION 1..218: note = Synthetic
RVQPTESIVRFPNITNLCPFGEVFNATRFASVYAWNRKRISNCVADYSVLYNSASFSTFKCYGVSPTKLNDLCFTNVYADSFVIRGDEVRQIAPGQTGKIADYNYKLPDDFTGCVIAWNSNNLDSKVGGNYNYLYRLFRKSNLKPFERDISTEIYQAGSTPCNGVEGFNCYFPLQSYGFQPTNGVGYQPYRVVVLSFELLHAPATVCGPKKSTNLVKN

SEQ ID NO: 397 - protein, 217 aa, synthetic construct
  REGION 1..217: note = Synthetic
RVQPTESIVRFPNITNLCPFGEVFNATRFASVYAWNRKRISNCVADYSVLYNSASFSTFKCYGVSPTKLNDLCFTNVYADSFVIRGDEVRQIAPGQTGKIADYNYKLPDDFTGCVIAWNSNNLDSKVGGNYNYLYRLFRKSNLKPFERDISTEIYQAGSTPCNGVEGFNCYFPLQSYGFQPTNGVGYQPYRVVVLSFELLHAPATVCGPKKSTNLVK

SEQ ID NO: 398 - protein, 216 aa, synthetic construct
  REGION 1..216: note = Synthetic
RVQPTESIVRFPNITNLCPFGEVFNATRFASVYAWNRKRISNCVADYSVLYNSASFSTFKCYGVSPTKLNDLCFTNVYADSFVIRGDEVRQIAPGQTGKIADYNYKLPDDFTGCVIAWNSNNLDSKVGGNYNYLYRLFRKSNLKPFERDISTEIYQAGSTPCNGVEGFNCYFPLQSYGFQPTNGVGYQPYRVVVLSFELLHAPATVCGPKKSTNLV

SEQ ID NO: 399 - protein, 215 aa, synthetic construct
  REGION 1..215: note = Synthetic
RVQPTESIVRFPNITNLCPFGEVFNATRFASVYAWNRKRISNCVADYSVLYNSASFSTFKCYGVSPTKLNDLCFTNVYADSFVIRGDEVRQIAPGQTGKIADYNYKLPDDFTGCVIAWNSNNLDSKVGGNYNYLYRLFRKSNLKPFERDISTEIYQAGSTPCNGVEGFNCYFPLQSYGFQPTNGVGYQPYRVVVLSFELLHAPATVCGPKKSTNL

SEQ ID NO: 400 - protein, 214 aa, synthetic construct
  REGION 1..214: note = Synthetic
RVQPTESIVRFPNITNLCPFGEVFNATRFASVYAWNRKRISNCVADYSVLYNSASFSTFKCYGVSPTKLNDLCFTNVYADSFVIRGDEVRQIAPGQTGKIADYNYKLPDDFTGCVIAWNSNNLDSKVGGNYNYLYRLFRKSNLKPFERDISTEIYQAGSTPCNGVEGFNCYFPLQSYGFQPTNGVGYQPYRVVVLSFELLHAPATVCGPKKSTN

SEQ ID NO: 401 - protein, 213 aa, synthetic construct
  REGION 1..213: note = Synthetic
RVQPTESIVRFPNITNLCPFGEVFNATRFASVYAWNRKRISNCVADYSVLYNSASFSTFKCYGVSPTKLNDLCFTNVYADSFVIRGDEVRQIAPGQTGKIADYNYKLPDDFTGCVIAWNSNNLDSKVGGNYNYLYRLFRKSNLKPFERDISTEIYQAGSTPCNGVEGFNCYFPLQSYGFQPTNGVGYQPYRVVVLSFELLHAPATVCGPKKST

SEQ ID NO: 402 - protein, 212 aa, synthetic construct
  REGION 1..212: note = Synthetic
RVQPTESIVRFPNITNLCPFGEVFNATRFASVYAWNRKRISNCVADYSVLYNSASFSTFKCYGVSPTKLNDLCFTNVYADSFVIRGDEVRQIAPGQTGKIADYNYKLPDDFTGCVIAWNSNNLDSKVGGNYNYLYRLFRKSNLKPFERDISTEIYQAGSTPCNGVEGFNCYFPLQSYGFQPTNGVGYQPYRVVVLSFELLHAPATVCGPKKS

SEQ ID NO: 403 - protein, 249 aa, synthetic construct
  REGION 1..249: note = Synthetic
VQPTESIVRFPNITNLCPFGEVFNATRFASVYAWNRKRISNCVADYSVLYNSASFSTFKCYGVSPTKLNDLCFTNVYADSFVIRGDEVRQIAPGQTGKIADYNYKLPDDFTGCVIAWNSNNLDSKVGGNYNYLYRLFRKSNLKPFERDISTEIYQAGSTPCNGVEGFNCYFPLQSYGFQPTNGVGYQPYRVVVLSFELLHAPATVCGPKKSTNLVKNKCVNFNFNGLTGTGVLTESNKKFLPFQQFGRD

SEQ ID NO: 404 - protein, 248 aa, synthetic construct
  REGION 1..248: note = Synthetic
QPTESIVRFPNITNLCPFGEVFNATRFASVYAWNRKRISNCVADYSVLYNSASFSTFKCYGVSPTKLNDLCFTNVYADSFVIRGDEVRQIAPGQTGKIADYNYKLPDDFTGCVIAWNSNNLDSKVGGNYNYLYRLFRKSNLKPFERDISTEIYQAGSTPCNGVEGFNCYFPLQSYGFQPTNGVGYQPYRVVVLSFELLHAPATVCGPKKSTNLVKNKCVNFNFNGLTGTGVLTESNKKFLPFQQFGRD

SEQ ID NO: 405 - protein, 247 aa, synthetic construct
  REGION 1..247: note = Synthetic
PTESIVRFPNITNLCPFGEVFNATRFASVYAWNRKRISNCVADYSVLYNSASFSTFKCYGVSPTKLNDLCFTNVYADSFVIRGDEVRQIAPGQTGKIADYNYKLPDDFTGCVIAWNSNNLDSKVGGNYNYLYRLFRKSNLKPFERDISTEIYQAGSTPCNGVEGFNCYFPLQSYGFQPTNGVGYQPYRVVVLSFELLHAPATVCGPKKSTNLVKNKCVNFNFNGLTGTGVLTESNKKFLPFQQFGRD

SEQ ID NO: 406 - protein, 246 aa, synthetic construct
  REGION 1..246: note = Synthetic
TESIVRFPNITNLCPFGEVFNATRFASVYAWNRKRISNCVADYSVLYNSASFSTFKCYGVSPTKLNDLCFTNVYADSFVIRGDEVRQIAPGQTGKIADYNYKLPDDFTGCVIAWNSNNLDSKVGGNYNYLYRLFRKSNLKPFERDISTEIYQAGSTPCNGVEGFNCYFPLQSYGFQPTNGVGYQPYRVVVLSFELLHAPATVCGPKKSTNLVKNKCVNFNFNGLTGTGVLTESNKKFLPFQQFGRD

SEQ ID NO: 407 - protein, 245 aa, synthetic construct
  REGION 1..245: note = Synthetic
ESIVRFPNITNLCPFGEVFNATRFASVYAWNRKRISNCVADYSVLYNSASFSTFKCYGVSPTKLNDLCFTNVYADSFVIRGDEVRQIAPGQTGKIADYNYKLPDDFTGCVIAWNSNNLDSKVGGNYNYLYRLFRKSNLKPFERDISTEIYQAGSTPCNGVEGFNCYFPLQSYGFQPTNGVGYQPYRVVVLSFELLHAPATVCGPKKSTNLVKNKCVNFNFNGLTGTGVLTESNKKFLPFQQFGRD

SEQ ID NO: 408 - protein, 244 aa, synthetic construct
  REGION 1..244: note = Synthetic
SIVRFPNITNLCPFGEVFNATRFASVYAWNRKRISNCVADYSVLYNSASFSTFKCYGVSPTKLNDLCFTNVYADSFVIRGDEVRQIAPGQTGKIADYNYKLPDDFTGCVIAWNSNNLDSKVGGNYNYLYRLFRKSNLKPFERDISTEIYQAGSTPCNGVEGFNCYFPLQSYGFQPTNGVGYQPYRVVVLSFELLHAPATVCGPKKSTNLVKNKCVNFNFNGLTGTGVLTESNKKFLPFQQFGRD

SEQ ID NO: 409 - protein, 243 aa, synthetic construct
  REGION 1..243: note = Synthetic
IVRFPNITNLCPFGEVFNATRFASVYAWNRKRISNCVADYSVLYNSASFSTFKCYGVSPTKLNDLCFTNVYADSFVIRGDEVRQIAPGQTGKIADYNYKLPDDFTGCVIAWNSNNLDSKVGGNYNYLYRLFRKSNLKPFERDISTEIYQAGSTPCNGVEGFNCYFPLQSYGFQPTNGVGYQPYRVVVLSFELLHAPATVCGPKKSTNLVKNKCVNFNFNGLTGTGVLTESNKKFLPFQQFGRD

SEQ ID NO: 410 - protein, 242 aa, synthetic construct
  REGION 1..242: note = Synthetic
VRFPNITNLCPFGEVFNATRFASVYAWNRKRISNCVADYSVLYNSASFSTFKCYGVSPTKLNDLCFTNVYADSFVIRGDEVRQIAPGQTGKIADYNYKLPDDFTGCVIAWNSNNLDSKVGGNYNYLYRLFRKSNLKPFERDISTEIYQAGSTPCNGVEGFNCYFPLQSYGFQPTNGVGYQPYRVVVLSFELLHAPATVCGPKKSTNLVKNKCVNFNFNGLTGTGVLTESNKKFLPFQQFGRD

SEQ ID NO: 411 - protein, 241 aa, synthetic construct
  REGION 1..241: note = Synthetic
RFPNITNLCPFGEVFNATRFASVYAWNRKRISNCVADYSVLYNSASFSTFKCYGVSPTKLNDLCFTNVYADSFVIRGDEVRQIAPGQTGKIADYNYKLPDDFTGCVIAWNSNNLDSKVGGNYNYLYRLFRKSNLKPFERDISTEIYQAGSTPCNGVEGFNCYFPLQSYGFQPTNGVGYQPYRVVVLSFELLHAPATVCGPKKSTNLVKNKCVNFNFNGLTGTGVLTESNKKFLPFQQFGRD

SEQ ID NO: 412 - protein, 240 aa, synthetic construct
  REGION 1..240: note = Synthetic
FPNITNLCPFGEVFNATRFASVYAWNRKRISNCVADYSVLYNSASFSTFKCYGVSPTKLNDLCFTNVYADSFVIRGDEVRQIAPGQTGKIADYNYKLPDDFTGCVIAWNSNNLDSKVGGNYNYLYRLFRKSNLKPFERDISTEIYQAGSTPCNGVEGFNCYFPLQSYGFQPTNGVGYQPYRVVVLSFELLHAPATVCGPKKSTNLVKNKCVNFNFNGLTGTGVLTESNKKFLPFQQFGRD

SEQ ID NO: 413 - protein, 239 aa, synthetic construct
  REGION 1..239: note = Synthetic
PNITNLCPFGEVFNATRFASVYAWNRKRISNCVADYSVLYNSASFSTFKCYGVSPTKLNDLCFTNVYADSFVIRGDEVRQIAPGQTGKIADYNYKLPDDFTGCVIAWNSNNLDSKVGGNYNYLYRLFRKSNLKPFERDISTEIYQAGSTPCNGVEGFNCYFPLQSYGFQPTNGVGYQPYRVVVLSFELLHAPATVCGPKKSTNLVKNKCVNFNFNGLTGTGVLTESNKKFLPFQQFGRD

SEQ ID NO: 414 - protein, 238 aa, synthetic construct; identical to SEQ ID NO: 29
  REGION 1..238: note = Synthetic

SEQ ID NO: 415 - protein, 237 aa, synthetic construct
  REGION 1..237: note = Synthetic
ITNLCPFGEVFNATRFASVYAWNRKRISNCVADYSVLYNSASFSTFKCYGVSPTKLNDLCFTNVYADSFVIRGDEVRQIAPGQTGKIADYNYKLPDDFTGCVIAWNSNNLDSKVGGNYNYLYRLFRKSNLKPFERDISTEIYQAGSTPCNGVEGFNCYFPLQSYGFQPTNGVGYQPYRVVVLSFELLHAPATVCGPKKSTNLVKNKCVNFNFNGLTGTGVLTESNKKFLPFQQFGRD

SEQ ID NO: 416 - protein, 236 aa, synthetic construct
  REGION 1..236: note = Synthetic
TNLCPFGEVFNATRFASVYAWNRKRISNCVADYSVLYNSASFSTFKCYGVSPTKLNDLCFTNVYADSFVIRGDEVRQIAPGQTGKIADYNYKLPDDFTGCVIAWNSNNLDSKVGGNYNYLYRLFRKSNLKPFERDISTEIYQAGSTPCNGVEGFNCYFPLQSYGFQPTNGVGYQPYRVVVLSFELLHAPATVCGPKKSTNLVKNKCVNFNFNGLTGTGVLTESNKKFLPFQQFGRD

SEQ ID NO: 417 - protein, 235 aa, synthetic construct
  REGION 1..235: note = Synthetic
NLCPFGEVFNATRFASVYAWNRKRISNCVADYSVLYNSASFSTFKCYGVSPTKLNDLCFTNVYADSFVIRGDEVRQIAPGQTGKIADYNYKLPDDFTGCVIAWNSNNLDSKVGGNYNYLYRLFRKSNLKPFERDISTEIYQAGSTPCNGVEGFNCYFPLQSYGFQPTNGVGYQPYRVVVLSFELLHAPATVCGPKKSTNLVKNKCVNFNFNGLTGTGVLTESNKKFLPFQQFGRD

SEQ ID NO: 418 - protein, 234 aa, synthetic construct
  REGION 1..234: note = Synthetic
LCPFGEVFNATRFASVYAWNRKRISNCVADYSVLYNSASFSTFKCYGVSPTKLNDLCFTNVYADSFVIRGDEVRQIAPGQTGKIADYNYKLPDDFTGCVIAWNSNNLDSKVGGNYNYLYRLFRKSNLKPFERDISTEIYQAGSTPCNGVEGFNCYFPLQSYGFQPTNGVGYQPYRVVVLSFELLHAPATVCGPKKSTNLVKNKCVNFNFNGLTGTGVLTESNKKFLPFQQFGRD

SEQ ID NO: 419 - protein, 233 aa, synthetic construct
  REGION 1..233: note = Synthetic
CPFGEVFNATRFASVYAWNRKRISNCVADYSVLYNSASFSTFKCYGVSPTKLNDLCFTNVYADSFVIRGDEVRQIAPGQTGKIADYNYKLPDDFTGCVIAWNSNNLDSKVGGNYNYLYRLFRKSNLKPFERDISTEIYQAGSTPCNGVEGFNCYFPLQSYGFQPTNGVGYQPYRVVVLSFELLHAPATVCGPKKSTNLVKNKCVNFNFNGLTGTGVLTESNKKFLPFQQFGRD

SEQ ID NO: 420 - protein, 232 aa, synthetic construct
  REGION 1..232: note = Synthetic
PFGEVFNATRFASVYAWNRKRISNCVADYSVLYNSASFSTFKCYGVSPTKLNDLCFTNVYADSFVIRGDEVRQIAPGQTGKIADYNYKLPDDFTGCVIAWNSNNLDSKVGGNYNYLYRLFRKSNLKPFERDISTEIYQAGSTPCNGVEGFNCYFPLQSYGFQPTNGVGYQPYRVVVLSFELLHAPATVCGPKKSTNLVKNKCVNFNFNGLTGTGVLTESNKKFLPFQQFGRD

SEQ ID NO: 421 - protein, 231 aa, synthetic construct
  REGION 1..231: note = Synthetic
FGEVFNATRFASVYAWNRKRISNCVADYSVLYNSASFSTFKCYGVSPTKLNDLCFTNVYADSFVIRGDEVRQIAPGQTGKIADYNYKLPDDFTGCVIAWNSNNLDSKVGGNYNYLYRLFRKSNLKPFERDISTEIYQAGSTPCNGVEGFNCYFPLQSYGFQPTNGVGYQPYRVVVLSFELLHAPATVCGPKKSTNLVKNKCVNFNFNGLTGTGVLTESNKKFLPFQQFGRD

SEQ ID NO: 422 - protein, 230 aa, synthetic construct
  REGION 1..230: note = Synthetic
GEVFNATRFASVYAWNRKRISNCVADYSVLYNSASFSTFKCYGVSPTKLNDLCFTNVYADSFVIRGDEVRQIAPGQTGKIADYNYKLPDDFTGCVIAWNSNNLDSKVGGNYNYLYRLFRKSNLKPFERDISTEIYQAGSTPCNGVEGFNCYFPLQSYGFQPTNGVGYQPYRVVVLSFELLHAPATVCGPKKSTNLVKNKCVNFNFNGLTGTGVLTESNKKFLPFQQFGRD

SEQ ID NO: 423 - protein, 229 aa, synthetic construct
  REGION 1..229: note = Synthetic
EVFNATRFASVYAWNRKRISNCVADYSVLYNSASFSTFKCYGVSPTKLNDLCFTNVYADSFVIRGDEVRQIAPGQTGKIADYNYKLPDDFTGCVIAWNSNNLDSKVGGNYNYLYRLFRKSNLKPFERDISTEIYQAGSTPCNGVEGFNCYFPLQSYGFQPTNGVGYQPYRVVVLSFELLHAPATVCGPKKSTNLVKNKCVNFNFNGLTGTGVLTESNKKFLPFQQFGRD

SEQ ID NO: 424 - protein, 228 aa, synthetic construct
  REGION 1..228: note = Synthetic
VFNATRFASVYAWNRKRISNCVADYSVLYNSASFSTFKCYGVSPTKLNDLCFTNVYADSFVIRGDEVRQIAPGQTGKIADYNYKLPDDFTGCVIAWNSNNLDSKVGGNYNYLYRLFRKSNLKPFERDISTEIYQAGSTPCNGVEGFNCYFPLQSYGFQPTNGVGYQPYRVVVLSFELLHAPATVCGPKKSTNLVKNKCVNFNFNGLTGTGVLTESNKKFLPFQQFGRD

SEQ ID NO: 425 - protein, 227 aa, synthetic construct
  REGION 1..227: note = Synthetic
FNATRFASVYAWNRKRISNCVADYSVLYNSASFSTFKCYGVSPTKLNDLCFTNVYADSFVIRGDEVRQIAPGQTGKIADYNYKLPDDFTGCVIAWNSNNLDSKVGGNYNYLYRLFRKSNLKPFERDISTEIYQAGSTPCNGVEGFNCYFPLQSYGFQPTNGVGYQPYRVVVLSFELLHAPATVCGPKKSTNLVKNKCVNFNFNGLTGTGVLTESNKKFLPFQQFGRD

SEQ ID NO: 426 - protein, 226 aa, synthetic construct
  REGION 1..226: note = Synthetic
NATRFASVYAWNRKRISNCVADYSVLYNSASFSTFKCYGVSPTKLNDLCFTNVYADSFVIRGDEVRQIAPGQTGKIADYNYKLPDDFTGCVIAWNSNNLDSKVGGNYNYLYRLFRKSNLKPFERDISTEIYQAGSTPCNGVEGFNCYFPLQSYGFQPTNGVGYQPYRVVVLSFELLHAPATVCGPKKSTNLVKNKCVNFNFNGLTGTGVLTESNKKFLPFQQFGRD

SEQ ID NO: 427 - protein, 225 aa, synthetic construct
  REGION 1..225: note = Synthetic
ATRFASVYAWNRKRISNCVADYSVLYNSASFSTFKCYGVSPTKLNDLCFTNVYADSFVIRGDEVRQIAPGQTGKIADYNYKLPDDFTGCVIAWNSNNLDSKVGGNYNYLYRLFRKSNLKPFERDISTEIYQAGSTPCNGVEGFNCYFPLQSYGFQPTNGVGYQPYRVVVLSFELLHAPATVCGPKKSTNLVKNKCVNFNFNGLTGTGVLTESNKKFLPFQQFGRD

SEQ ID NO: 428 - protein, 224 aa, synthetic construct
  REGION 1..224: note = Synthetic
TRFASVYAWNRKRISNCVADYSVLYNSASFSTFKCYGVSPTKLNDLCFTNVYADSFVIRGDEVRQIAPGQTGKIADYNYKLPDDFTGCVIAWNSNNLDSKVGGNYNYLYRLFRKSNLKPFERDISTEIYQAGSTPCNGVEGFNCYFPLQSYGFQPTNGVGYQPYRVVVLSFELLHAPATVCGPKKSTNLVKNKCVNFNFNGLTGTGVLTESNKKFLPFQQFGRD

SEQ ID NO: 429 - protein, 223 aa, synthetic construct
  REGION 1..223: note = Synthetic
RFASVYAWNRKRISNCVADYSVLYNSASFSTFKCYGVSPTKLNDLCFTNVYADSFVIRGDEVRQIAPGQTGKIADYNYKLPDDFTGCVIAWNSNNLDSKVGGNYNYLYRLFRKSNLKPFERDISTEIYQAGSTPCNGVEGFNCYFPLQSYGFQPTNGVGYQPYRVVVLSFELLHAPATVCGPKKSTNLVKNKCVNFNFNGLTGTGVLTESNKKFLPFQQFGRD

SEQ ID NO: 430 - protein, 222 aa, synthetic construct
  REGION 1..222: note = Synthetic
FASVYAWNRKRISNCVADYSVLYNSASFSTFKCYGVSPTKLNDLCFTNVYADSFVIRGDEVRQIAPGQTGKIADYNYKLPDDFTGCVIAWNSNNLDSKVGGNYNYLYRLFRKSNLKPFERDISTEIYQAGSTPCNGVEGFNCYFPLQSYGFQPTNGVGYQPYRVVVLSFELLHAPATVCGPKKSTNLVKNKCVNFNFNGLTGTGVLTESNKKFLPFQQFGRD

SEQ ID NO: 431 - protein, 221 aa, synthetic construct
  REGION 1..221: note = Synthetic
ASVYAWNRKRISNCVADYSVLYNSASFSTFKCYGVSPTKLNDLCFTNVYADSFVIRGDEVRQIAPGQTGKIADYNYKLPDDFTGCVIAWNSNNLDSKVGGNYNYLYRLFRKSNLKPFERDISTEIYQAGSTPCNGVEGFNCYFPLQSYGFQPTNGVGYQPYRVVVLSFELLHAPATVCGPKKSTNLVKNKCVNFNFNGLTGTGVLTESNKKFLPFQQFGRD

SEQ ID NO: 432 - protein, 220 aa, synthetic construct
  REGION 1..220: note = Synthetic
SVYAWNRKRISNCVADYSVLYNSASFSTFKCYGVSPTKLNDLCFTNVYADSFVIRGDEVRQIAPGQTGKIADYNYKLPDDFTGCVIAWNSNNLDSKVGGNYNYLYRLFRKSNLKPFERDISTEIYQAGSTPCNGVEGFNCYFPLQSYGFQPTNGVGYQPYRVVVLSFELLHAPATVCGPKKSTNLVKNKCVNFNFNGLTGTGVLTESNKKFLPFQQFGRD

SEQ ID NO: 433 - protein, 219 aa, synthetic construct
  REGION 1..219: note = Synthetic
VYAWNRKRISNCVADYSVLYNSASFSTFKCYGVSPTKLNDLCFTNVYADSFVIRGDEVRQIAPGQTGKIADYNYKLPDDFTGCVIAWNSNNLDSKVGGNYNYLYRLFRKSNLKPFERDISTEIYQAGSTPCNGVEGFNCYFPLQSYGFQPTNGVGYQPYRVVVLSFELLHAPATVCGPKKSTNLVKNKCVNFNFNGLTGTGVLTESNKKFLPFQQFGRD

SEQ ID NO: 434 - protein, 218 aa, synthetic construct
  REGION 1..218: note = Synthetic
YAWNRKRISNCVADYSVLYNSASFSTFKCYGVSPTKLNDLCFTNVYADSFVIRGDEVRQIAPGQTGKIADYNYKLPDDFTGCVIAWNSNNLDSKVGGNYNYLYRLFRKSNLKPFERDISTEIYQAGSTPCNGVEGFNCYFPLQSYGFQPTNGVGYQPYRVVVLSFELLHAPATVCGPKKSTNLVKNKCVNFNFNGLTGTGVLTESNKKFLPFQQFGRD

SEQ ID NO: 435 - protein, 217 aa, synthetic construct
  REGION 1..217: note = Synthetic
AWNRKRISNCVADYSVLYNSASFSTFKCYGVSPTKLNDLCFTNVYADSFVIRGDEVRQIAPGQTGKIADYNYKLPDDFTGCVIAWNSNNLDSKVGGNYNYLYRLFRKSNLKPFERDISTEIYQAGSTPCNGVEGFNCYFPLQSYGFQPTNGVGYQPYRVVVLSFELLHAPATVCGPKKSTNLVKNKCVNFNFNGLTGTGVLTESNKKFLPFQQFGRD

SEQ ID NO: 436 - protein, 216 aa, synthetic construct
  REGION 1..216: note = Synthetic
WNRKRISNCVADYSVLYNSASFSTFKCYGVSPTKLNDLCFTNVYADSFVIRGDEVRQIAPGQTGKIADYNYKLPDDFTGCVIAWNSNNLDSKVGGNYNYLYRLFRKSNLKPFERDISTEIYQAGSTPCNGVEGFNCYFPLQSYGFQPTNGVGYQPYRVVVLSFELLHAPATVCGPKKSTNLVKNKCVNFNFNGLTGTGVLTESNKKFLPFQQFGRD

SEQ ID NO: 437 - protein, 215 aa, synthetic construct
  REGION 1..215: note = Synthetic
NRKRISNCVADYSVLYNSASFSTFKCYGVSPTKLNDLCFTNVYADSFVIRGDEVRQIAPGQTGKIADYNYKLPDDFTGCVIAWNSNNLDSKVGGNYNYLYRLFRKSNLKPFERDISTEIYQAGSTPCNGVEGFNCYFPLQSYGFQPTNGVGYQPYRVVVLSFELLHAPATVCGPKKSTNLVKNKCVNFNFNGLTGTGVLTESNKKFLPFQQFGRD

SEQ ID NO: 438 - protein, 214 aa, synthetic construct
  REGION 1..214: note = Synthetic
RKRISNCVADYSVLYNSASFSTFKCYGVSPTKLNDLCFTNVYADSFVIRGDEVRQIAPGQTGKIADYNYKLPDDFTGCVIAWNSNNLDSKVGGNYNYLYRLFRKSNLKPFERDISTEIYQAGSTPCNGVEGFNCYFPLQSYGFQPTNGVGYQPYRVVVLSFELLHAPATVCGPKKSTNLVKNKCVNFNFNGLTGTGVLTESNKKFLPFQQFGRD

SEQ ID NO: 439 - protein, 213 aa, synthetic construct
  REGION 1..213: note = Synthetic
KRISNCVADYSVLYNSASFSTFKCYGVSPTKLNDLCFTNVYADSFVIRGDEVRQIAPGQTGKIADYNYKLPDDFTGCVIAWNSNNLDSKVGGNYNYLYRLFRKSNLKPFERDISTEIYQAGSTPCNGVEGFNCYFPLQSYGFQPTNGVGYQPYRVVVLSFELLHAPATVCGPKKSTNLVKNKCVNFNFNGLTGTGVLTESNKKFLPFQQFGRD

SEQ ID NO: 440 - protein, 212 aa, synthetic construct
  REGION 1..212: note = Synthetic
RISNCVADYSVLYNSASFSTFKCYGVSPTKLNDLCFTNVYADSFVIRGDEVRQIAPGQTGKIADYNYKLPDDFTGCVIAWNSNNLDSKVGGNYNYLYRLFRKSNLKPFERDISTEIYQAGSTPCNGVEGFNCYFPLQSYGFQPTNGVGYQPYRVVVLSFELLHAPATVCGPKKSTNLVKNKCVNFNFNGLTGTGVLTESNKKFLPFQQFGRD

SEQ ID NO: 441 - protein, 211 aa, synthetic construct
  REGION 1..211: note = Synthetic
ISNCVADYSVLYNSASFSTFKCYGVSPTKLNDLCFTNVYADSFVIRGDEVRQIAPGQTGKIADYNYKLPDDFTGCVIAWNSNNLDSKVGGNYNYLYRLFRKSNLKPFERDISTEIYQAGSTPCNGVEGFNCYFPLQSYGFQPTNGVGYQPYRVVVLSFELLHAPATVCGPKKSTNLVKNKCVNFNFNGLTGTGVLTESNKKFLPFQQFGRD

SEQ ID NO: 442 - protein, 210 aa, synthetic construct
  REGION 1..210: note = Synthetic
SNCVADYSVLYNSASFSTFKCYGVSPTKLNDLCFTNVYADSFVIRGDEVRQIAPGQTGKIADYNYKLPDDFTGCVIAWNSNNLDSKVGGNYNYLYRLFRKSNLKPFERDISTEIYQAGSTPCNGVEGFNCYFPLQSYGFQPTNGVGYQPYRVVVLSFELLHAPATVCGPKKSTNLVKNKCVNFNFNGLTGTGVLTESNKKFLPFQQFGRD

SEQ ID NO: 443 - protein, 209 aa, synthetic construct
  REGION 1..209: note = Synthetic
NCVADYSVLYNSASFSTFKCYGVSPTKLNDLCFTNVYADSFVIRGDEVRQIAPGQTGKIADYNYKLPDDFTGCVIAWNSNNLDSKVGGNYNYLYRLFRKSNLKPFERDISTEIYQAGSTPCNGVEGFNCYFPLQSYGFQPTNGVGYQPYRVVVLSFELLHAPATVCGPKKSTNLVKNKCVNFNFNGLTGTGVLTESNKKFLPFQQFGRD

SEQ ID NO: 444 - protein, 208 aa, synthetic construct
  REGION 1..208: note = Synthetic
CVADYSVLYNSASFSTFKCYGVSPTKLNDLCFTNVYADSFVIRGDEVRQIAPGQTGKIADYNYKLPDDFTGCVIAWNSNNLDSKVGGNYNYLYRLFRKSNLKPFERDISTEIYQAGSTPCNGVEGFNCYFPLQSYGFQPTNGVGYQPYRVVVLSFELLHAPATVCGPKKSTNLVKNKCVNFNFNGLTGTGVLTESNKKFLPFQQFGRD

SEQ ID NO: 445 - protein, 207 aa, synthetic construct
  REGION 1..207: note = Synthetic
VADYSVLYNSASFSTFKCYGVSPTKLNDLCFTNVYADSFVIRGDEVRQIAPGQTGKIADYNYKLPDDFTGCVIAWNSNNLDSKVGGNYNYLYRLFRKSNLKPFERDISTEIYQAGSTPCNGVEGFNCYFPLQSYGFQPTNGVGYQPYRVVVLSFELLHAPATVCGPKKSTNLVKNKCVNFNFNGLTGTGVLTESNKKFLPFQQFGRD

SEQ ID NO: 446 - protein, 206 aa, synthetic construct
  REGION 1..206: note = Synthetic
ADYSVLYNSASFSTFKCYGVSPTKLNDLCFTNVYADSFVIRGDEVRQIAPGQTGKIADYNYKLPDDFTGCVIAWNSNNLDSKVGGNYNYLYRLFRKSNLKPFERDISTEIYQAGSTPCNGVEGFNCYFPLQSYGFQPTNGVGYQPYRVVVLSFELLHAPATVCGPKKSTNLVKNKCVNFNFNGLTGTGVLTESNKKFLPFQQFGRD

SEQ ID NO: 447 - protein, 205 aa, synthetic construct
  REGION 1..205: note = Synthetic
DYSVLYNSASFSTFKCYGVSPTKLNDLCFTNVYADSFVIRGDEVRQIAPGQTGKIADYNYKLPDDFTGCVIAWNSNNLDSKVGGNYNYLYRLFRKSNLKPFERDISTEIYQAGSTPCNGVEGFNCYFPLQSYGFQPTNGVGYQPYRVVVLSFELLHAPATVCGPKKSTNLVKNKCVNFNFNGLTGTGVLTESNKKFLPFQQFGRD

SEQ ID NO: 448 - protein, 204 aa, synthetic construct
  REGION 1..204: note = Synthetic
YSVLYNSASFSTFKCYGVSPTKLNDLCFTNVYADSFVIRGDEVRQIAPGQTGKIADYNYKLPDDFTGCVIAWNSNNLDSKVGGNYNYLYRLFRKSNLKPFERDISTEIYQAGSTPCNGVEGFNCYFPLQSYGFQPTNGVGYQPYRVVVLSFELLHAPATVCGPKKSTNLVKNKCVNFNFNGLTGTGVLTESNKKFLPFQQFGRD

SEQ ID NO: 449 - protein, 203 aa, synthetic construct
  REGION 1..203: note = Synthetic
SVLYNSASFSTFKCYGVSPTKLNDLCFTNVYADSFVIRGDEVRQIAPGQTGKIADYNYKLPDDFTGCVIAWNSNNLDSKVGGNYNYLYRLFRKSNLKPFERDISTEIYQAGSTPCNGVEGFNCYFPLQSYGFQPTNGVGYQPYRVVVLSFELLHAPATVCGPKKSTNLVKNKCVNFNFNGLTGTGVLTESNKKFLPFQQFGRD

SEQ ID NO: 450 - DNA, 747 bp, synthetic construct
  misc_feature 1..747: note = Synthetic
  source 1..747: mol_type = other DNA
agggttcagcccaccgaatcaatagtacggttcccaaatatcactaatctttgccccttcggggaagtatttaacgctactcgatttgctagcgtatatgcctggaaccggaagagaataagcaactgtgttgcagactatagcgtgctttacaattccgcatcctttagtaccttcaaatgttacggtgtgagccccaccaaactcaatgatctctgtttcacaaacgtgtacgcagatagtttcgttatacgcggggacgaagtacggcagatagcccctggccagacaggaaagatagccgattacaactacaaacttccagacgattttacagggtgtgtgatcgcttggaattcaaataacctggactccaaagtgggaggcaactataattacctgtaccgactgttccgcaaaagcaacttgaaacctttcgagcgagatatatcaaccgaaatctaccaagctggttctacaccttgtaatggtgtggagggatttaactgctacttccctcttcagtcctatggatttcagcctacaaatggagtcgggtatcaaccctatagagtcgtggtgttgtcatttgaacttctccatgcacctgctactgtctgtggtccaaaaaagtccactaatcttgtaaaaaacaaatgcgtgaacttcaatttcaatggcctcaccggaacaggtgttttgacagaatctaacaaaaaattccttcccttccagcaattcgggaga

SEQ ID NO: 451 - DNA, 744 bp, synthetic construct
  misc_feature 1..744: note = Synthetic
  source 1..744: mol_type = other DNA
agggttcagcccaccgaatcaatagtacggttcccaaatatcactaatctttgccccttcggggaagtatttaacgctactcgatttgctagcgtatatgcctggaaccggaagagaataagcaactgtgttgcagactatagcgtgctttacaattccgcatcctttagtaccttcaaatgttacggtgtgagccccaccaaactcaatgatctctgtttcacaaacgtgtacgcagatagtttcgttatacgcggggacgaagtacggcagatagcccctggccagacaggaaagatagccgattacaactacaaacttccagacgattttacagggtgtgtgatcgcttggaattcaaataacctggactccaaagtgggaggcaactataattacctgtaccgactgttccgcaaaagcaacttgaaacctttcgagcgagatatatcaaccgaaatctaccaagctggttctacaccttgtaatggtgtggagggatttaactgctacttccctcttcagtcctatggatttcagcctacaaatggagtcgggtatcaaccctatagagtcgtggtgttgtcatttgaacttctccatgcacctgctactgtctgtggtccaaaaaagtccactaatcttgtaaaaaacaaatgcgtgaacttcaatttcaatggcctcaccggaacaggtgttttgacagaatctaacaaaaaattccttcccttccagcaattcggg

SEQ ID NO: 452 - DNA, 741 bp, synthetic construct
  misc_feature 1..741: note = Synthetic
  source 1..741: mol_type = other DNA
agggttcagcccaccgaatcaatagtacggttcccaaatatcactaatctttgccccttcggggaagtatttaacgctactcgatttgctagcgtatatgcctggaaccggaagagaataagcaactgtgttgcagactatagcgtgctttacaattccgcatcctttagtaccttcaaatgttacggtgtgagccccaccaaactcaatgatctctgtttcacaaacgtgtacgcagatagtttcgttatacgcggggacgaagtacggcagatagcccctggccagacaggaaagatagccgattacaactacaaacttccagacgattttacagggtgtgtgatcgcttggaattcaaataacctggactccaaagtgggaggcaactataattacctgtaccgactgttccgcaaaagcaacttgaaacctttcgagcgagatatatcaaccgaaatctaccaagctggttctacaccttgtaatggtgtggagggatttaactgctacttccctcttcagtcctatggatttcagcctacaaatggagtcgggtatcaaccctatagagtcgtggtgttgtcatttgaacttctccatgcacctgctactgtctgtggtccaaaaaagtccactaatcttgtaaaaaacaaatgcgtgaacttcaatttcaatggcctcaccggaacaggtgttttgacagaatctaacaaaaaattccttcccttccagcaattc

SEQ ID NO: 453 - DNA, 738 bp, synthetic construct
  misc_feature 1..738: note = Synthetic
  source 1..738: mol_type = other DNA
agggttcagcccaccgaatcaatagtacggttcccaaatatcactaatctttgccccttcggggaagtatttaacgctactcgatttgctagcgtatatgcctggaaccggaagagaataagcaactgtgttgcagactatagcgtgctttacaattccgcatcctttagtaccttcaaatgttacggtgtgagccccaccaaactcaatgatctctgtttcacaaacgtgtacgcagatagtttcgttatacgcggggacgaagtacggcagatagcccctggccagacaggaaagatagccgattacaactacaaacttccagacgattttacagggtgtgtgatcgcttggaattcaaataacctggactccaaagtgggaggcaactataattacctgtaccgactgttccgcaaaagcaacttgaaacctttcgagcgagatatatcaaccgaaatctaccaagctggttctacaccttgtaatggtgtggagggatttaactgctacttccctcttcagtcctatggatttcagcctacaaatggagtcgggtatcaaccctatagagtcgtggtgttgtcatttgaacttctccatgcacctgctactgtctgtggtccaaaaaagtccactaatcttgtaaaaaacaaatgcgtgaacttcaatttcaatggcctcaccggaacaggtgttttgacagaatctaacaaaaaattccttcccttccagcaa

SEQ ID NO: 454 - DNA, 735 bp, synthetic construct
  misc_feature 1..735: note = Synthetic
  source 1..735: mol_type = other DNA
agggttcagcccaccgaatcaatagtacggttcccaaatatcactaatctttgccccttcggggaagtatttaacgctactcgatttgctagcgtatatgcctggaaccggaagagaataagcaactgtgttgcagactatagcgtgctttacaattccgcatcctttagtaccttcaaatgttacggtgtgagccccaccaaactcaatgatctctgtttcacaaacgtgtacgcagatagtttcgttatacgcggggacgaagtacggcagatagcccctggccagacaggaaagatagccgattacaactacaaacttccagacgattttacagggtgtgtgatcgcttggaattcaaataacctggactccaaagtgggaggcaactataattacctgtaccgactgttccgcaaaagcaacttgaaacctttcgagcgagatatatcaaccgaaatctaccaagctggttctacaccttgtaatggtgtggagggatttaactgctacttccctcttcagtcctatggatttcagcctacaaatggagtcgggtatcaaccctatagagtcgtggtgttgtcatttgaacttctccatgcacctgctactgtctgtggtccaaaaaagtccactaatcttgtaaaaaacaaatgcgtgaacttcaatttcaatggcctcaccggaacaggtgttttgacagaatctaacaaaaaattccttcccttccag

SEQ ID NO: 455 - DNA, 732 bp, synthetic construct
  misc_feature 1..732: note = Synthetic
  source 1..732: mol_type = other DNA
agggttcagcccaccgaatcaatagtacggttcccaaatatcactaatctttgccccttcggggaagtatttaacgctactcgatttgctagcgtatatgcctggaaccggaagagaataagcaactgtgttgcagactatagcgtgctttacaattccgcatcctttagtaccttcaaatgttacggtgtgagccccaccaaactcaatgatctctgtttcacaaacgtgtacgcagatagtttcgttatacgcggggacgaagtacggcagatagcccctggccagacaggaaagatagccgattacaactacaaacttccagacgattttacagggtgtgtgatcgcttggaattcaaataacctggactccaaagtgggaggcaactataattacctgtaccgactgttccgcaaaagcaacttgaaacctttcgagcgagatatatcaaccgaaatctaccaagctggttctacaccttgtaatggtgtggagggatttaactgctacttccctcttcagtcctatggatttcagcctacaaatggagtcgggtatcaaccctatagagtcgtggtgttgtcatttgaacttctccatgcacctgctactgtctgtggtccaaaaaagtccactaatcttgtaaaaaacaaatgcgtgaacttcaatttcaatggcctcaccggaacaggtgttttgacagaatctaacaaaaaattccttcccttc

SEQ ID NO: 456 - DNA, 729 bp, synthetic construct
  misc_feature 1..729: note = Synthetic
  source 1..729: mol_type = other DNA
agggttcagcccaccgaatcaatagtacggttcccaaatatcactaatctttgccccttcggggaagtatttaacgctactcgatttgctagcgtatatgcctggaaccggaagagaataagcaactgtgttgcagactatagcgtgctttacaattccgcatcctttagtaccttcaaatgttacggtgtgagccccaccaaactcaatgatctctgtttcacaaacgtgtacgcagatagtttcgttatacgcggggacgaagtacggcagatagcccctggccagacaggaaagatagccgattacaactacaaacttccagacgattttacagggtgtgtgatcgcttggaattcaaataacctggactccaaagtgggaggcaactataattacctgtaccgactgttccgcaaaagcaacttgaaacctttcgagcgagatatatcaaccgaaatctaccaagctggttctacaccttgtaatggtgtggagggatttaactgctacttccctcttcagtcctatggatttcagcctacaaatggagtcgggtatcaaccctatagagtcgtggtgttgtcatttgaacttctccatgcacctgctactgtctgtggtccaaaaaagtccactaatcttgtaaaaaacaaatgcgtgaacttcaatttcaatggcctcaccggaacaggtgttttgacagaatctaacaaaaaattccttccc

SEQ ID NO: 457 - DNA, 726 bp, synthetic construct
  misc_feature 1..726: note = Synthetic
  source 1..726: mol_type = other DNA
agggttcagcccaccgaatcaatagtacggttcccaaatatcactaatctttgccccttcggggaagtatttaacgctactcgatttgctagcgtatatgcctggaaccggaagagaataagcaactgtgttgcagactatagcgtgctttacaattccgcatcctttagtaccttcaaatgttacggtgtgagccccaccaaactcaatgatctctgtttcacaaacgtgtacgcagatagtttcgttatacgcggggacgaagtacggcagatagcccctggccagacaggaaagatagccgattacaactacaaacttccagacgattttacagggtgtgtgatcgcttggaattcaaataacctggactccaaagtgggaggcaactataattacctgtaccgactgttccgcaaaagcaacttgaaacctttcgagcgagatatatcaaccgaaatctaccaagctggttctacaccttgtaatggtgtggagggatttaactgctacttccctcttcagtcctatggatttcagcctacaaatggagtcgggtatcaaccctatagagtcgtggtgttgtcatttgaacttctccatgcacctgctactgtctgtggtccaaaaaagtccactaatcttgtaaaaaacaaatgcgtgaacttcaatttcaatggcctcaccggaacaggtgttttgacagaatctaacaaaaaattcctt

SEQ ID NO: 458 - DNA, 723 bp, synthetic construct
  misc_feature 1..723: note = Synthetic
  source 1..723: mol_type = other DNA
agggttcagcccaccgaatcaatagtacggttcccaaatatcactaatctttgccccttcggggaagtatttaacgctactcgatttgctagcgtatatgcctggaaccggaagagaataagcaactgtgttgcagactatagcgtgctttacaattccgcatcctttagtaccttcaaatgttacggtgtgagccccaccaaactcaatgatctctgtttcacaaacgtgtacgcagatagtttcgttatacgcggggacgaagtacggcagatagcccctggccagacaggaaagatagccgattacaactacaaacttccagacgattttacagggtgtgtgatcgcttggaattcaaataacctggactccaaagtgggaggcaactataattacctgtaccgactgttccgcaaaagcaacttgaaacctttcgagcgagatatatcaaccgaaatctaccaagctggttctacaccttgtaatggtgtggagggatttaactgctacttccctcttcagtcctatggatttcagcctacaaatggagtcgggtatcaaccctatagagtcgtggtgttgtcatttgaacttctccatgcacctgctactgtctgtggtccaaaaaagtccactaatcttgtaaaaaacaaatgcgtgaacttcaatttcaatggcctcaccggaacaggtgttttgacagaatctaacaaaaaattc

SEQ ID NO: 459 - DNA, 720 bp, synthetic construct
  misc_feature 1..720: note = Synthetic
  source 1..720: mol_type = other DNA
agggttcagcccaccgaatcaatagtacggttcccaaatatcactaatctttgccccttcggggaagtatttaacgctactcgatttgctagcgtatatgcctggaaccggaagagaataagcaactgtgttgcagactatagcgtgctttacaattccgcatcctttagtaccttcaaatgttacggtgtgagccccaccaaactcaatgatctctgtttcacaaacgtgtacgcagatagtttcgttatacgcggggacgaagtacggcagatagcccctggccagacaggaaagatagccgattacaactacaaacttccagacgattttacagggtgtgtgatcgcttggaattcaaataacctggactccaaagtgggaggcaactataattacctgtaccgactgttccgcaaaagcaacttgaaacctttcgagcgagatatatcaaccgaaatctaccaagctggttctacaccttgtaatggtgtggagggatttaactgctacttccctcttcagtcctatggatttcagcctacaaatggagtcgggtatcaaccctatagagtcgtggtgttgtcatttgaacttctccatgcacctgctactgtctgtggtccaaaaaagtccactaatcttgtaaaaaacaaatgcgtgaacttcaatttcaatggcctcaccggaacaggtgttttgacagaatctaacaaaaaa

SEQ ID NO: 460 - DNA, 717 bp, synthetic construct
  misc_feature 1..717: note = Synthetic
  source 1..717: mol_type = other DNA
agggttcagcccaccgaatcaatagtacggttcccaaatatcactaatctttgccccttcggggaagtatttaacgctactcgatttgctagcgtatatgcctggaaccggaagagaataagcaactgtgttgcagactatagcgtgctttacaattccgcatcctttagtaccttcaaatgttacggtgtgagccccaccaaactcaatgatctctgtttcacaaacgtgtacgcagatagtttcgttatacgcggggacgaagtacggcagatagcccctggccagacaggaaagatagccgattacaactacaaacttccagacgattttacagggtgtgtgatcgcttggaattcaaataacctggactccaaagtgggaggcaactataattacctgtaccgactgttccgcaaaagcaacttgaaacctttcgagcgagatatatcaaccgaaatctaccaagctggttctacaccttgtaatggtgtggagggatttaactgctacttccctcttcagtcctatggatttcagcctacaaatggagtcgggtatcaaccctatagagtcgtggtgttgtcatttgaacttctccatgcacctgctactgtctgtggtccaaaaaagtccactaatcttgtaaaaaacaaatgcgtgaacttcaatttcaatggcctcaccggaacaggtgttttgacagaatctaacaaa

SEQ ID NO: 461 - DNA, 714 bp, synthetic construct
  misc_feature 1..714: note = Synthetic
  source 1..714: mol_type = other DNA
agggttcagcccaccgaatcaatagtacggttcccaaatatcactaatctttgccccttcggggaagtatttaacgctactcgatttgctagcgtatatgcctggaaccggaagagaataagcaactgtgttgcagactatagcgtgctttacaattccgcatcctttagtaccttcaaatgttacggtgtgagccccaccaaactcaatgatctctgtttcacaaacgtgtacgcagatagtttcgttatacgcggggacgaagtacggcagatagcccctggccagacaggaaagatagccgattacaactacaaacttccagacgattttacagggtgtgtgatcgcttggaattcaaataacctggactccaaagtgggaggcaactataattacctgtaccgactgttccgcaaaagcaacttgaaacctttcgagcgagatatatcaaccgaaatctaccaagctggttctacaccttgtaatggtgtggagggatttaactgctacttccctcttcagtcctatggatttcagcctacaaatggagtcgggtatcaaccctatagagtcgtggtgttgtcatttgaacttctccatgcacctgctactgtctgtggtccaaaaaagtccactaatcttgtaaaaaacaaatgcgtgaacttcaatttcaatggcctcaccggaacaggtgttttgacagaatctaac

SEQ ID NO: 462 - DNA, 711 bp, synthetic construct; identical to SEQ ID NO: 38
  misc_feature 1..711: note = Synthetic
  source 1..711: mol_type = other DNA

SEQ ID NO: 463 - DNA, 708 bp, synthetic construct
  misc_feature 1..708: note = Synthetic
  source 1..708: mol_type = other DNA
agggttcagcccaccgaatcaatagtacggttcccaaatatcactaatctttgccccttcggggaagtatttaacgctactcgatttgctagcgtatatgcctggaaccggaagagaataagcaactgtgttgcagactatagcgtgctttacaattccgcatcctttagtaccttcaaatgttacggtgtgagccccaccaaactcaatgatctctgtttcacaaacgtgtacgcagatagtttcgttatacgcggggacgaagtacggcagatagcccctggccagacaggaaagatagccgattacaactacaaacttccagacgattttacagggtgtgtgatcgcttggaattcaaataacctggactccaaagtgggaggcaactataattacctgtaccgactgttccgcaaaagcaacttgaaacctttcgagcgagatatatcaaccgaaatctaccaagctggttctacaccttgtaatggtgtggagggatttaactgctacttccctcttcagtcctatggatttcagcctacaaatggagtcgggtatcaaccctatagagtcgtggtgttgtcatttgaacttctccatgcacctgctactgtctgtggtccaaaaaagtccactaatcttgtaaaaaacaaatgcgtgaacttcaatttcaatggcctcaccggaacaggtgttttgacagaa

SEQ ID NO: 464 - DNA, 705 bp, synthetic construct
  misc_feature 1..705: note = Synthetic
  source 1..705: mol_type = other DNA
agggttcagcccaccgaatcaatagtacggttcccaaatatcactaatctttgccccttcggggaagtatttaacgctactcgatttgctagcgtatatgcctggaaccggaagagaataagcaactgtgttgcagactatagcgtgctttacaattccgcatcctttagtaccttcaaatgttacggtgtgagccccaccaaactcaatgatctctgtttcacaaacgtgtacgcagatagtttcgttatacgcggggacgaagtacggcagatagcccctggccagacaggaaagatagccgattacaactacaaacttccagacgattttacagggtgtgtgatcgcttggaattcaaataacctggactccaaagtgggaggcaactataattacctgtaccgactgttccgcaaaagcaacttgaaacctttcgagcgagatatatcaaccgaaatctaccaagctggttctacaccttgtaatggtgtggagggatttaactgctacttccctcttcagtcctatggatttcagcctacaaatggagtcgggtatcaaccctatagagtcgtggtgttgtcatttgaacttctccatgcacctgctactgtctgtggtccaaaaaagtccactaatcttgtaaaaaacaaatgcgtgaacttcaatttcaatggcctcaccggaacaggtgttttgaca

SEQ ID NO: 465 - DNA, 702 bp, synthetic construct
  misc_feature 1..702: note = Synthetic
  source 1..702: mol_type = other DNA
agggttcagcccaccgaatcaatagtacggttcccaaatatcactaatctttgccccttcggggaagtatttaacgctactcgatttgctagcgtatatgcctggaaccggaagagaataagcaactgtgttgcagactatagcgtgctttacaattccgcatcctttagtaccttcaaatgttacggtgtgagccccaccaaactcaatgatctctgtttcacaaacgtgtacgcagatagtttcgttatacgcggggacgaagtacggcagatagcccctggccagacaggaaagatagccgattacaactacaaacttccagacgattttacagggtgtgtgatcgcttggaattcaaataacctggactccaaagtgggaggcaactataattacctgtaccgactgttccgcaaaagcaacttgaaacctttcgagcgagatatatcaaccgaaatctaccaagctggttctacaccttgtaatggtgtggagggatttaactgctacttccctcttcagtcctatggatttcagcctacaaatggagtcgggtatcaaccctatagagtcgtggtgttgtcatttgaacttctccatgcacctgctactgtctgtggtccaaaaaagtccactaatcttgtaaaaaacaaatgcgtgaacttcaatttcaatggcctcaccggaacaggtgttttg

SEQ ID NO: 466 - DNA, 699 bp, synthetic construct
  misc_feature 1..699: note = Synthetic
  source 1..699: mol_type = other DNA
agggttcagcccaccgaatcaatagtacggttcccaaatatcactaatctttgccccttcggggaagtatttaacgctactcgatttgctagcgtatatgcctggaaccggaagagaataagcaactgtgttgcagactatagcgtgctttacaattccgcatcctttagtaccttcaaatgttacggtgtgagccccaccaaactcaatgatctctgtttcacaaacgtgtacgcagatagtttcgttatacgcggggacgaagtacggcagatagcccctggccagacaggaaagatagccgattacaactacaaacttccagacgattttacagggtgtgtgatcgcttggaattcaaataacctggactccaaagtgggaggcaactataattacctgtaccgactgttccgcaaaagcaacttgaaacctttcgagcgagatatatcaaccgaaatctaccaagctggttctacaccttgtaatggtgtggagggatttaactgctacttccctcttcagtcctatggatttcagcctacaaatggagtcgggtatcaaccctatagagtcgtggtgttgtcatttgaacttctccatgcacctgctactgtctgtggtccaaaaaagtccactaatcttgtaaaaaacaaatgcgtgaacttcaatttcaatggcctcaccggaacaggtgtt

SEQ ID NO: 467 - DNA, 696 bp, synthetic construct
  misc_feature 1..696: note = Synthetic
  source 1..696: mol_type = other DNA
agggttcagcccaccgaatcaatagtacggttcccaaatatcactaatctttgccccttcggggaagtatttaacgctactcgatttgctagcgtatatgcctggaaccggaagagaataagcaactgtgttgcagactatagcgtgctttacaattccgcatcctttagtaccttcaaatgttacggtgtgagccccaccaaactcaatgatctctgtttcacaaacgtgtacgcagatagtttcgttatacgcggggacgaagtacggcagatagcccctggccagacaggaaagatagccgattacaactacaaacttccagacgattttacagggtgtgtgatcgcttggaattcaaataacctggactccaaagtgggaggcaactataattacctgtaccgactgttccgcaaaagcaacttgaaacctttcgagcgagatatatcaaccgaaatctaccaagctggttctacaccttgtaatggtgtggagggatttaactgctacttccctcttcagtcctatggatttcagcctacaaatggagtcgggtatcaaccctatagagtcgtggtgttgtcatttgaacttctccatgcacctgctactgtctgtggtccaaaaaagtccactaatcttgtaaaaaacaaatgcgtgaacttcaatttcaatggcctcaccggaacaggt

SEQ ID NO: 468 - DNA, 693 bp, synthetic construct
  misc_feature 1..693: note = Synthetic
  source 1..693: mol_type = other DNA
agggttcagcccaccgaatcaatagtacggttcccaaatatcactaatctttgccccttcggggaagtatttaacgctactcgatttgctagcgtatatgcctggaaccggaagagaataagcaactgtgttgcagactatagcgtgctttacaattccgcatcctttagtaccttcaaatgttacggtgtgagccccaccaaactcaatgatctctgtttcacaaacgtgtacgcagatagtttcgttatacgcggggacgaagtacggcagatagcccctggccagacaggaaagatagccgattacaactacaaacttccagacgattttacagggtgtgtgatcgcttggaattcaaataacctggactccaaagtgggaggcaactataattacctgtaccgactgttccgcaaaagcaacttgaaacctttcgagcgagatatatcaaccgaaatctaccaagctggttctacaccttgtaatggtgtggagggatttaactgctacttccctcttcagtcctatggatttcagcctacaaatggagtcgggtatcaaccctatagagtcgtggtgttgtcatttgaacttctccatgcacctgctactgtctgtggtccaaaaaagtccactaatcttgtaaaaaacaaatgcgtgaacttcaatttcaatggcctcaccggaaca

SEQ ID NO: 469 - DNA, 690 bp, synthetic construct
  misc_feature 1..690: note = Synthetic
  source 1..690: mol_type = other DNA
agggttcagcccaccgaatcaatagtacggttcccaaatatcactaatctttgccccttcggggaagtatttaacgctactcgatttgctagcgtatatgcctggaaccggaagagaataagcaactgtgttgcagactatagcgtgctttacaattccgcatcctttagtaccttcaaatgttacggtgtgagccccaccaaactcaatgatctctgtttcacaaacgtgtacgcagatagtttcgttatacgcggggacgaagtacggcagatagcccctggccagacaggaaagatagccgattacaactacaaacttccagacgattttacagggtgtgtgatcgcttggaattcaaataacctggactccaaagtgggaggcaactataattacctgtaccgactgttccgcaaaagcaacttgaaacctttcgagcgagatatatcaaccgaaatctaccaagctggttctacaccttgtaatggtgtggagggatttaactgctacttccctcttcagtcctatggatttcagcctacaaatggagtcgggtatcaaccctatagagtcgtggtgttgtcatttgaacttctccatgcacctgctactgtctgtggtccaaaaaagtccactaatcttgtaaaaaacaaatgcgtgaacttcaatttcaatggcctcaccgga

SEQ ID NO: 470 - DNA, 687 bp, synthetic construct
  misc_feature 1..687: note = Synthetic
  source 1..687: mol_type = other DNA
agggttcagcccaccgaatcaatagtacggttcccaaatatcactaatctttgccccttcggggaagtatttaacgctactcgatttgctagcgtatatgcctggaaccggaagagaataagcaactgtgttgcagactatagcgtgctttacaattccgcatcctttagtaccttcaaatgttacggtgtgagccccaccaaactcaatgatctctgtttcacaaacgtgtacgcagatagtttcgttatacgcggggacgaagtacggcagatagcccctggccagacaggaaagatagccgattacaactacaaacttccagacgattttacagggtgtgtgatcgcttggaattcaaataacctggactccaaagtgggaggcaactataattacctgtaccgactgttccgcaaaagcaacttgaaacctttcgagcgagatatatcaaccgaaatctaccaagctggttctacaccttgtaatggtgtggagggatttaactgctacttccctcttcagtcctatggatttcagcctacaaatggagtcgggtatcaaccctatagagtcgtggtgttgtcatttgaacttctccatgcacctgctactgtctgtggtccaaaaaagtccactaatcttgtaaaaaacaaatgcgtgaacttcaatttcaatggcctcacc

SEQ ID NO: 471 - DNA, 684 bp, synthetic construct
  misc_feature 1..684: note = Synthetic
  source 1..684: mol_type = other DNA
agggttcagcccaccgaatcaatagtacggttcccaaatatcactaatctttgccccttcggggaagtatttaacgctactcgatttgctagcgtatatgcctggaaccggaagagaataagcaactgtgttgcagactatagcgtgctttacaattccgcatcctttagtaccttcaaatgttacggtgtgagccccaccaaactcaatgatctctgtttcacaaacgtgtacgcagatagtttcgttatacgcggggacgaagtacggcagatagcccctggccagacaggaaagatagccgattacaactacaaacttccagacgattttacagggtgtgtgatcgcttggaattcaaataacctggactccaaagtgggaggcaactataattacctgtaccgactgttccgcaaaagcaacttgaaacctttcgagcgagatatatcaaccgaaatctaccaagctggttctacaccttgtaatggtgtggagggatttaactgctacttccctcttcagtcctatggatttcagcctacaaatggagtcgggtatcaaccctatagagtcgtggtgttgtcatttgaacttctccatgcacctgctactgtctgtggtccaaaaaagtccactaatcttgtaaaaaacaaatgcgtgaacttcaatttcaatggcctc

SEQ ID NO: 472 - DNA, 681 bp, synthetic construct
  misc_feature 1..681: note = Synthetic
  source 1..681: mol_type = other DNA
agggttcagcccaccgaatcaatagtacggttcccaaatatcactaatctttgccccttcggggaagtatttaacgctactcgatttgctagcgtatatgcctggaaccggaagagaataagcaactgtgttgcagactatagcgtgctttacaattccgcatcctttagtaccttcaaatgttacggtgtgagccccaccaaactcaatgatctctgtttcacaaacgtgtacgcagatagtttcgttatacgcggggacgaagtacggcagatagcccctggccagacaggaaagatagccgattacaactacaaacttccagacgattttacagggtgtgtgatcgcttggaattcaaataacctggactccaaagtgggaggcaactataattacctgtaccgactgttccgcaaaagcaacttgaaacctttcgagcgagatatatcaaccgaaatctaccaagctggttctacaccttgtaatggtgtggagggatttaactgctacttccctcttcagtcctatggatttcagcctacaaatggagtcgggtatcaaccctatagagtcgtggtgttgtcatttgaacttctccatgcacctgctactgtctgtggtccaaaaaagtccactaatcttgtaaaaaacaaatgcgtgaacttcaatttcaatggc

SEQ ID NO: 473 - DNA, 678 bp, synthetic construct
  misc_feature 1..678: note = Synthetic
  source 1..678: mol_type = other DNA
agggttcagcccaccgaatcaatagtacggttcccaaatatcactaatctttgccccttcggggaagtatttaacgctactcgatttgctagcgtatatgcctggaaccggaagagaataagcaactgtgttgcagactatagcgtgctttacaattccgcatcctttagtaccttcaaatgttacggtgtgagccccaccaaactcaatgatctctgtttcacaaacgtgtacgcagatagtttcgttatacgcggggacgaagtacggcagatagcccctggccagacaggaaagatagccgattacaactacaaacttccagacgattttacagggtgtgtgatcgcttggaattcaaataacctggactccaaagtgggaggcaactataattacctgtaccgactgttccgcaaaagcaacttgaaacctttcgagcgagatatatcaaccgaaatctaccaagctggttctacaccttgtaatggtgtggagggatttaactgctacttccctcttcagtcctatggatttcagcctacaaatggagtcgggtatcaaccctatagagtcgtggtgttgtcatttgaacttctccatgcacctgctactgtctgtggtccaaaaaagtccactaatcttgtaaaaaacaaatgcgtgaacttcaatttcaat

SEQ ID NO: 474 - DNA, 675 bp, synthetic construct
  misc_feature 1..675: note = Synthetic
  source 1..675: mol_type = other DNA
agggttcagcccaccgaatcaatagtacggttcccaaatatcactaatctttgccccttcggggaagtatttaacgctactcgatttgctagcgtatatgcctggaaccggaagagaataagcaactgtgttgcagactatagcgtgctttacaattccgcatcctttagtaccttcaaatgttacggtgtgagccccaccaaactcaatgatctctgtttcacaaacgtgtacgcagatagtttcgttatacgcggggacgaagtacggcagatagcccctggccagacaggaaagatagccgattacaactacaaacttccagacgattttacagggtgtgtgatcgcttggaattcaaataacctggactccaaagtgggaggcaactataattacctgtaccgactgttccgcaaaagcaacttgaaacctttcgagcgagatatatcaaccgaaatctaccaagctggttctacaccttgtaatggtgtggagggatttaactgctacttccctcttcagtcctatggatttcagcctacaaatggagtcgggtatcaaccctatagagtcgtggtgttgtcatttgaacttctccatgcacctgctactgtctgtggtccaaaaaagtccactaatcttgtaaaaaacaaatgcgtgaacttcaatttc

SEQ ID NO: 475 - DNA, 672 bp, synthetic construct
  misc_feature 1..672: note = Synthetic
  source 1..672: mol_type = other DNA
agggttcagcccaccgaatcaatagtacggttcccaaatatcactaatctttgccccttcggggaagtatttaacgctactcgatttgctagcgtatatgcctggaaccggaagagaataagcaactgtgttgcagactatagcgtgctttacaattccgcatcctttagtaccttcaaatgttacggtgtgagccccaccaaactcaatgatctctgtttcacaaacgtgtacgcagatagtttcgttatacgcggggacgaagtacggcagatagcccctggccagacaggaaagatagccgattacaactacaaacttccagacgattttacagggtgtgtgatcgcttggaattcaaataacctggactccaaagtgggaggcaactataattacctgtaccgactgttccgcaaaagcaacttgaaacctttcgagcgagatatatcaaccgaaatctaccaagctggttctacaccttgtaatggtgtggagggatttaactgctacttccctcttcagtcctatggatttcagcctacaaatggagtcgggtatcaaccctatagagtcgtggtgttgtcatttgaacttctccatgcacctgctactgtctgtggtccaaaaaagtccactaatcttgtaaaaaacaaatgcgtgaacttcaat

SEQ ID NO: 476 - DNA, 669 bp, synthetic construct
  misc_feature 1..669: note = Synthetic
  source 1..669: mol_type = other DNA
agggttcagcccaccgaatcaatagtacggttcccaaatatcactaatctttgccccttcggggaagtatttaacgctactcgatttgctagcgtatatgcctggaaccggaagagaataagcaactgtgttgcagactatagcgtgctttacaattccgcatcctttagtaccttcaaatgttacggtgtgagccccaccaaactcaatgatctctgtttcacaaacgtgtacgcagatagtttcgttatacgcggggacgaagtacggcagatagcccctggccagacaggaaagatagccgattacaactacaaacttccagacgattttacagggtgtgtgatcgcttggaattcaaataacctggactccaaagtgggaggcaactataattacctgtaccgactgttccgcaaaagcaacttgaaacctttcgagcgagatatatcaaccgaaatctaccaagctggttctacaccttgtaatggtgtggagggatttaactgctacttccctcttcagtcctatggatttcagcctacaaatggagtcgggtatcaaccctatagagtcgtggtgttgtcatttgaacttctccatgcacctgctactgtctgtggtccaaaaaagtccactaatcttgtaaaaaacaaatgcgtgaacttc

SEQ ID NO: 477 - DNA, 666 bp, synthetic construct
  misc_feature 1..666: note = Synthetic
  source 1..666: mol_type = other DNA
agggttcagcccaccgaatcaatagtacggttcccaaatatcactaatctttgccccttcggggaagtatttaacgctactcgatttgctagcgtatatgcctggaaccggaagagaataagcaactgtgttgcagactatagcgtgctttacaattccgcatcctttagtaccttcaaatgttacggtgtgagccccaccaaactcaatgatctctgtttcacaaacgtgtacgcagatagtttcgttatacgcggggacgaagtacggcagatagcccctggccagacaggaaagatagccgattacaactacaaacttccagacgattttacagggtgtgtgatcgcttggaattcaaataacctggactccaaagtgggaggcaactataattacctgtaccgactgttccgcaaaagcaacttgaaacctttcgagcgagatatatcaaccgaaatctaccaagctggttctacaccttgtaatggtgtggagggatttaactgctacttccctcttcagtcctatggatttcagcctacaaatggagtcgggtatcaaccctatagagtcgtggtgttgtcatttgaacttctccatgcacctgctactgtctgtggtccaaaaaagtccactaatcttgtaaaaaacaaatgcgtgaac

SEQ ID NO: 478 - DNA, 663 bp, synthetic construct
  misc_feature 1..663: note = Synthetic
  source 1..663: mol_type = other DNA
agggttcagcccaccgaatcaatagtacggttcccaaatatcactaatctttgccccttcggggaagtatttaacgctactcgatttgctagcgtatatgcctggaaccggaagagaataagcaactgtgttgcagactatagcgtgctttacaattccgcatcctttagtaccttcaaatgttacggtgtgagccccaccaaactcaatgatctctgtttcacaaacgtgtacgcagatagtttcgttatacgcggggacgaagtacggcagatagcccctggccagacaggaaagatagccgattacaactacaaacttccagacgattttacagggtgtgtgatcgcttggaattcaaataacctggactccaaagtgggaggcaactataattacctgtaccgactgttccgcaaaagcaacttgaaacctttcgagcgagatatatcaaccgaaatctaccaagctggttctacaccttgtaatggtgtggagggatttaactgctacttccctcttcagtcctatggatttcagcctacaaatggagtcgggtatcaaccctatagagtcgtggtgttgtcatttgaacttctccatgcacctgctactgtctgtggtccaaaaaagtccactaatcttgtaaaaaacaaatgcgtg

SEQ ID NO: 479 - DNA, 660 bp, synthetic construct
  misc_feature 1..660: note = Synthetic
  source 1..660: mol_type = other DNA
agggttcagcccaccgaatcaatagtacggttcccaaatatcactaatctttgccccttcggggaagtatttaacgctactcgatttgctagcgtatatgcctggaaccggaagagaataagcaactgtgttgcagactatagcgtgctttacaattccgcatcctttagtaccttcaaatgttacggtgtgagccccaccaaactcaatgatctctgtttcacaaacgtgtacgcagatagtttcgttatacgcggggacgaagtacggcagatagcccctggccagacaggaaagatagccgattacaactacaaacttccagacgattttacagggtgtgtgatcgcttggaattcaaataacctggactccaaagtgggaggcaactataattacctgtaccgactgttccgcaaaagcaacttgaaacctttcgagcgagatatatcaaccgaaatctaccaagctggttctacaccttgtaatggtgtggagggatttaactgctacttccctcttcagtcctatggatttcagcctacaaatggagtcgggtatcaaccctatagagtcgtggtgttgtcatttgaacttctccatgcacctgctactgtctgtggtccaaaaaagtccactaatcttgtaaaaaacaaatgc

SEQ ID NO: 480 - DNA, 657 bp, synthetic construct
  misc_feature 1..657: note = Synthetic
  source 1..657: mol_type = other DNA
agggttcagcccaccgaatcaatagtacggttcccaaatatcactaatctttgccccttcggggaagtatttaacgctactcgatttgctagcgtatatgcctggaaccggaagagaataagcaactgtgttgcagactatagcgtgctttacaattccgcatcctttagtaccttcaaatgttacggtgtgagccccaccaaactcaatgatctctgtttcacaaacgtgtacgcagatagtttcgttatacgcggggacgaagtacggcagatagcccctggccagacaggaaagatagccgattacaactacaaacttccagacgattttacagggtgtgtgatcgcttggaattcaaataacctggactccaaagtgggaggcaactataattacctgtaccgactgttccgcaaaagcaacttgaaacctttcgagcgagatatatcaaccgaaatctaccaagctggttctacaccttgtaatggtgtggagggatttaactgctacttccctcttcagtcctatggatttcagcctacaaatggagtcgggtatcaaccctatagagtcgtggtgttgtcatttgaacttctccatgcacctgctactgtctgtggtccaaaaaagtccactaatcttgtaaaaaacaaa

SEQ ID NO: 481 - DNA, 654 bp, synthetic construct
  misc_feature 1..654: note = Synthetic
  source 1..654: mol_type = other DNA
agggttcagcccaccgaatcaatagtacggttcccaaatatcactaatctttgccccttcggggaagtatttaacgctactcgatttgctagcgtatatgcctggaaccggaagagaataagcaactgtgttgcagactatagcgtgctttacaattccgcatcctttagtaccttcaaatgttacggtgtgagccccaccaaactcaatgatctctgtttcacaaacgtgtacgcagatagtttcgttatacgcggggacgaagtacggcagatagcccctggccagacaggaaagatagccgattacaactacaaacttccagacgattttacagggtgtgtgatcgcttggaattcaaataacctggactccaaagtgggaggcaactataattacctgtaccgactgttccgcaaaagcaacttgaaacctttcgagcgagatatatcaaccgaaatctaccaagctggttctacaccttgtaatggtgtggagggatttaactgctacttccctcttcagtcctatggatttcagcctacaaatggagtcgggtatcaaccctatagagtcgtggtgttgtcatttgaacttctccatgcacctgctactgtctgtggtccaaaaaagtccactaatcttgtaaaaaac

SEQ ID NO: 482 - DNA, 651 bp, synthetic construct
  misc_feature 1..651: note = Synthetic
  source 1..651: mol_type = other DNA
agggttcagcccaccgaatcaatagtacggttcccaaatatcactaatctttgccccttcggggaagtatttaacgctactcgatttgctagcgtatatgcctggaaccggaagagaataagcaactgtgttgcagactatagcgtgctttacaattccgcatcctttagtaccttcaaatgttacggtgtgagccccaccaaactcaatgatctctgtttcacaaacgtgtacgcagatagtttcgttatacgcggggacgaagtacggcagatagcccctggccagacaggaaagatagccgattacaactacaaacttccagacgattttacagggtgtgtgatcgcttggaattcaaataacctggactccaaagtgggaggcaactataattacctgtaccgactgttccgcaaaagcaacttgaaacctttcgagcgagatatatcaaccgaaatctaccaagctggttctacaccttgtaatggtgtggagggatttaactgctacttccctcttcagtcctatggatttcagcctacaaatggagtcgggtatcaaccctatagagtcgtggtgttgtcatttgaacttctccatgcacctgctactgtctgtggtccaaaaaagtccactaatcttgtaaaa

SEQ ID NO: 483 - DNA, 648 bp, synthetic construct
  misc_feature 1..648: note = Synthetic
  source 1..648: mol_type = other DNA
agggttcagcccaccgaatcaatagtacggttcccaaatatcactaatctttgccccttcggggaagtatttaacgctactcgatttgctagcgtatatgcctggaaccggaagagaataagcaactgtgttgcagactatagcgtgctttacaattccgcatcctttagtaccttcaaatgttacggtgtgagccccaccaaactcaatgatctctgtttcacaaacgtgtacgcagatagtttcgttatacgcggggacgaagtacggcagatagcccctggccagacaggaaagatagccgattacaactacaaacttccagacgattttacagggtgtgtgatcgcttggaattcaaataacctggactccaaagtgggaggcaactataattacctgtaccgactgttccgcaaaagcaacttgaaacctttcgagcgagatatatcaaccgaaatctaccaagctggttctacaccttgtaatggtgtggagggatttaactgctacttccctcttcagtcctatggatttcagcctacaaatggagtcgggtatcaaccctatagagtcgtggtgttgtcatttgaacttctccatgcacctgctactgtctgtggtccaaaaaagtccactaatcttgta

SEQ ID NO: 484 - DNA, 645 bp, synthetic construct
  misc_feature 1..645: note = Synthetic
  source 1..645: mol_type = other DNA
agggttcagcccaccgaatcaatagtacggttcccaaatatcactaatctttgccccttcggggaagtatttaacgctactcgatttgctagcgtatatgcctggaaccggaagagaataagcaactgtgttgcagactatagcgtgctttacaattccgcatcctttagtaccttcaaatgttacggtgtgagccccaccaaactcaatgatctctgtttcacaaacgtgtacgcagatagtttcgttatacgcggggacgaagtacggcagatagcccctggccagacaggaaagatagccgattacaactacaaacttccagacgattttacagggtgtgtgatcgcttggaattcaaataacctggactccaaagtgggaggcaactataattacctgtaccgactgttccgcaaaagcaacttgaaacctttcgagcgagatatatcaaccgaaatctaccaagctggttctacaccttgtaatggtgtggagggatttaactgctacttccctcttcagtcctatggatttcagcctacaaatggagtcgggtatcaaccctatagagtcgtggtgttgtcatttgaacttctccatgcacctgctactgtctgtggtccaaaaaagtccactaatctt

SEQ ID NO: 485 - DNA, 642 bp, synthetic construct
  misc_feature 1..642: note = Synthetic
  source 1..642: mol_type = other DNA
agggttcagcccaccgaatcaatagtacggttcccaaatatcactaatctttgccccttcggggaagtatttaacgctactcgatttgctagcgtatatgcctggaaccggaagagaataagcaactgtgttgcagactatagcgtgctttacaattccgcatcctttagtaccttcaaatgttacggtgtgagccccaccaaactcaatgatctctgtttcacaaacgtgtacgcagatagtttcgttatacgcggggacgaagtacggcagatagcccctggccagacaggaaagatagccgattacaactacaaacttccagacgattttacagggtgtgtgatcgcttggaattcaaataacctggactccaaagtgggaggcaactataattacctgtaccgactgttccgcaaaagcaacttgaaacctttcgagcgagatatatcaaccgaaatctaccaagctggttctacaccttgtaatggtgtggagggatttaactgctacttccctcttcagtcctatggatttcagcctacaaatggagtcgggtatcaaccctatagagtcgtggtgttgtcatttgaacttctccatgcacctgctactgtctgtggtccaaaaaagtccactaat

SEQ ID NO: 486 - DNA, 639 bp, synthetic construct
  misc_feature 1..639: note = Synthetic
  source 1..639: mol_type = other DNA
agggttcagcccaccgaatcaatagtacggttcccaaatatcactaatctttgccccttcggggaagtatttaacgctactcgatttgctagcgtatatgcctggaaccggaagagaataagcaactgtgttgcagactatagcgtgctttacaattccgcatcctttagtaccttcaaatgttacggtgtgagccccaccaaactcaatgatctctgtttcacaaacgtgtacgcagatagtttcgttatacgcggggacgaagtacggcagatagcccctggccagacaggaaagatagccgattacaactacaaacttccagacgattttacagggtgtgtgatcgcttggaattcaaataacctggactccaaagtgggaggcaactataattacctgtaccgactgttccgcaaaagcaacttgaaacctttcgagcgagatatatcaaccgaaatctaccaagctggttctacaccttgtaatggtgtggagggatttaactgctacttccctcttcagtcctatggatttcagcctacaaatggagtcgggtatcaaccctatagagtcgtggtgttgtcatttgaacttctccatgcacctgctactgtctgtggtccaaaaaagtccact

SEQ ID NO: 487 - DNA, 636 bp, synthetic construct
  misc_feature 1..636: note = Synthetic
  source 1..636: mol_type = other DNA
agggttcagcccaccgaatcaatagtacggttcccaaatatcactaatctttgccccttcggggaagtatttaacgctactcgatttgctagcgtatatgcctggaaccggaagagaataagcaactgtgttgcagactatagcgtgctttacaattccgcatcctttagtaccttcaaatgttacggtgtgagccccaccaaactcaatgatctctgtttcacaaacgtgtacgcagatagtttcgttatacgcggggacgaagtacggcagatagcccctggccagacaggaaagatagccgattacaactacaaacttccagacgattttacagggtgtgtgatcgcttggaattcaaataacctggactccaaagtgggaggcaactataattacctgtaccgactgttccgcaaaagcaacttgaaacctttcgagcgagatatatcaaccgaaatctaccaagctggttctacaccttgtaatggtgtggagggatttaactgctacttccctcttcagtcctatggatttcagcctacaaatggagtcgggtatcaaccctatagagtcgtggtgttgtcatttgaacttctccatgcacctgctactgtctgtggtccaaaaaagtcc

SEQ ID NO: 488 - DNA, 747 bp, synthetic construct
  misc_feature 1..747: note = Synthetic
  source 1..747: mol_type = other DNA
gttcagcccaccgaatcaatagtacggttcccaaatatcactaatctttgccccttcggggaagtatttaacgctactcgatttgctagcgtatatgcctggaaccggaagagaataagcaactgtgttgcagactatagcgtgctttacaattccgcatcctttagtaccttcaaatgttacggtgtgagccccaccaaactcaatgatctctgtttcacaaacgtgtacgcagatagtttcgttatacgcggggacgaagtacggcagatagcccctggccagacaggaaagatagccgattacaactacaaacttccagacgattttacagggtgtgtgatcgcttggaattcaaataacctggactccaaagtgggaggcaactataattacctgtaccgactgttccgcaaaagcaacttgaaacctttcgagcgagatatatcaaccgaaatctaccaagctggttctacaccttgtaatggtgtggagggatttaactgctacttccctcttcagtcctatggatttcagcctacaaatggagtcgggtatcaaccctatagagtcgtggtgttgtcatttgaacttctccatgcacctgctactgtctgtggtccaaaaaagtccactaatcttgtaaaaaacaaatgcgtgaacttcaatttcaatggcctcaccggaacaggtgttttgacagaatctaacaaaaaattccttcccttccagcaattcgggagagat

SEQ ID NO: 489 - DNA, 744 bp, synthetic construct
  misc_feature 1..744: note = Synthetic
  source 1..744: mol_type = other DNA
cagcccaccgaatcaatagtacggttcccaaatatcactaatctttgccccttcggggaagtatttaacgctactcgatttgctagcgtatatgcctggaaccggaagagaataagcaactgtgttgcagactatagcgtgctttacaattccgcatcctttagtaccttcaaatgttacggtgtgagccccaccaaactcaatgatctctgtttcacaaacgtgtacgcagatagtttcgttatacgcggggacgaagtacggcagatagcccctggccagacaggaaagatagccgattacaactacaaacttccagacgattttacagggtgtgtgatcgcttggaattcaaataacctggactccaaagtgggaggcaactataattacctgtaccgactgttccgcaaaagcaacttgaaacctttcgagcgagatatatcaaccgaaatctaccaagctggttctacaccttgtaatggtgtggagggatttaactgctacttccctcttcagtcctatggatttcagcctacaaatggagtcgggtatcaaccctatagagtcgtggtgttgtcatttgaacttctccatgcacctgctactgtctgtggtccaaaaaagtccactaatcttgtaaaaaacaaatgcgtgaacttcaatttcaatggcctcaccggaacaggtgttttgacagaatctaacaaaaaattccttcccttccagcaattcgggagagat

SEQ ID NO: 490 - DNA, 741 bp, synthetic construct
  misc_feature 1..741: note = Synthetic
  source 1..741: mol_type = other DNA
cccaccgaatcaatagtacggttcccaaatatcactaatctttgccccttcggggaagtatttaacgctactcgatttgctagcgtatatgcctggaaccggaagagaataagcaactgtgttgcagactatagcgtgctttacaattccgcatcctttagtaccttcaaatgttacggtgtgagccccaccaaactcaatgatctctgtttcacaaacgtgtacgcagatagtttcgttatacgcggggacgaagtacggcagatagcccctggccagacaggaaagatagccgattacaactacaaacttccagacgattttacagggtgtgtgatcgcttggaattcaaataacctggactccaaagtgggaggcaactataattacctgtaccgactgttccgcaaaagcaacttgaaacctttcgagcgagatatatcaaccgaaatctaccaagctggttctacaccttgtaatggtgtggagggatttaactgctacttccctcttcagtcctatggatttcagcctacaaatggagtcgggtatcaaccctatagagtcgtggtgttgtcatttgaacttctccatgcacctgctactgtctgtggtccaaaaaagtccactaatcttgtaaaaaacaaatgcgtgaacttcaatttcaatggcctcaccggaacaggtgttttgacagaatctaacaaaaaattccttcccttccagcaattcgggagagat

SEQ ID NO: 491 - DNA, 738 bp, synthetic construct
  misc_feature 1..738: note = Synthetic
  source 1..738: mol_type = other DNA
accgaatcaatagtacggttcccaaatatcactaatctttgccccttcggggaagtatttaacgctactcgatttgctagcgtatatgcctggaaccggaagagaataagcaactgtgttgcagactatagcgtgctttacaattccgcatcctttagtaccttcaaatgttacggtgtgagccccaccaaactcaatgatctctgtttcacaaacgtgtacgcagatagtttcgttatacgcggggacgaagtacggcagatagcccctggccagacaggaaagatagccgattacaactacaaacttccagacgattttacagggtgtgtgatcgcttggaattcaaataacctggactccaaagtgggaggcaactataattacctgtaccgactgttccgcaaaagcaacttgaaacctttcgagcgagatatatcaaccgaaatctaccaagctggttctacaccttgtaatggtgtggagggatttaactgctacttccctcttcagtcctatggatttcagcctacaaatggagtcgggtatcaaccctatagagtcgtggtgttgtcatttgaacttctccatgcacctgctactgtctgtggtccaaaaaagtccactaatcttgtaaaaaacaaatgcgtgaacttcaatttcaatggcctcaccggaacaggtgttttgacagaatctaacaaaaaattccttcccttccagcaattcgggagagat

SEQ ID NO: 492 - DNA, 735 bp, synthetic construct
  misc_feature 1..735: note = Synthetic
  source 1..735: mol_type = other DNA
gaatcaatagtacggttcccaaatatcactaatctttgccccttcggggaagtatttaacgctactcgatttgctagcgtatatgcctggaaccggaagagaataagcaactgtgttgcagactatagcgtgctttacaattccgcatcctttagtaccttcaaatgttacggtgtgagccccaccaaactcaatgatctctgtttcacaaacgtgtacgcagatagtttcgttatacgcggggacgaagtacggcagatagcccctggccagacaggaaagatagccgattacaactacaaacttccagacgattttacagggtgtgtgatcgcttggaattcaaataacctggactccaaagtgggaggcaactataattacctgtaccgactgttccgcaaaagcaacttgaaacctttcgagcgagatatatcaaccgaaatctaccaagctggttctacaccttgtaatggtgtggagggatttaactgctacttccctcttcagtcctatggatttcagcctacaaatggagtcgggtatcaaccctatagagtcgtggtgttgtcatttgaacttctccatgcacctgctactgtctgtggtccaaaaaagtccactaatcttgtaaaaaacaaatgcgtgaacttcaatttcaatggcctcaccggaacaggtgttttgacagaatctaacaaaaaattccttcccttccagcaattcgggagagat

SEQ ID NO: 493 - DNA, 732 bp, synthetic construct
  misc_feature 1..732: note = Synthetic
  source 1..732: mol_type = other DNA
tcaatagtacggttcccaaatatcactaatctttgccccttcggggaagtatttaacgctactcgatttgctagcgtatatgcctggaaccggaagagaataagcaactgtgttgcagactatagcgtgctttacaattccgcatcctttagtaccttcaaatgttacggtgtgagccccaccaaactcaatgatctctgtttcacaaacgtgtacgcagatagtttcgttatacgcggggacgaagtacggcagatagcccctggccagacaggaaagatagccgattacaactacaaacttccagacgattttacagggtgtgtgatcgcttggaattcaaataacctggactccaaagtgggaggcaactataattacctgtaccgactgttccgcaaaagcaacttgaaacctttcgagcgagatatatcaaccgaaatctaccaagctggttctacaccttgtaatggtgtggagggatttaactgctacttccctcttcagtcctatggatttcagcctacaaatggagtcgggtatcaaccctatagagtcgtggtgttgtcatttgaacttctccatgcacctgctactgtctgtggtccaaaaaagtccactaatcttgtaaaaaacaaatgcgtgaacttcaatttcaatggcctcaccggaacaggtgttttgacagaatctaacaaaaaattccttcccttccagcaattcgggagagat

SEQ ID NO: 494 - DNA, 729 bp, synthetic construct
  misc_feature 1..729: note = Synthetic
  source 1..729: mol_type = other DNA
atagtacggttcccaaatatcactaatctttgccccttcggggaagtatttaacgctactcgatttgctagcgtatatgcctggaaccggaagagaataagcaactgtgttgcagactatagcgtgctttacaattccgcatcctttagtaccttcaaatgttacggtgtgagccccaccaaactcaatgatctctgtttcacaaacgtgtacgcagatagtttcgttatacgcggggacgaagtacggcagatagcccctggccagacaggaaagatagccgattacaactacaaacttccagacgattttacagggtgtgtgatcgcttggaattcaaataacctggactccaaagtgggaggcaactataattacctgtaccgactgttccgcaaaagcaacttgaaacctttcgagcgagatatatcaaccgaaatctaccaagctggttctacaccttgtaatggtgtggagggatttaactgctacttccctcttcagtcctatggatttcagcctacaaatggagtcgggtatcaaccctatagagtcgtggtgttgtcatttgaacttctccatgcacctgctactgtctgtggtccaaaaaagtccactaatcttgtaaaaaacaaatgcgtgaacttcaatttcaatggcctcaccggaacaggtgttttgacagaatctaacaaaaaattccttcccttccagcaattcgggagagat

SEQ ID NO: 495 - DNA, 726 bp, synthetic construct
  misc_feature 1..726: note = Synthetic
  source 1..726: mol_type = other DNA
gtacggttcccaaatatcactaatctttgccccttcggggaagtatttaacgctactcgatttgctagcgtatatgcctggaaccggaagagaataagcaactgtgttgcagactatagcgtgctttacaattccgcatcctttagtaccttcaaatgttacggtgtgagccccaccaaactcaatgatctctgtttcacaaacgtgtacgcagatagtttcgttatacgcggggacgaagtacggcagatagcccctggccagacaggaaagatagccgattacaactacaaacttccagacgattttacagggtgtgtgatcgcttggaattcaaataacctggactccaaagtgggaggcaactataattacctgtaccgactgttccgcaaaagcaacttgaaacctttcgagcgagatatatcaaccgaaatctaccaagctggttctacaccttgtaatggtgtggagggatttaactgctacttccctcttcagtcctatggatttcagcctacaaatggagtcgggtatcaaccctatagagtcgtggtgttgtcatttgaacttctccatgcacctgctactgtctgtggtccaaaaaagtccactaatcttgtaaaaaacaaatgcgtgaacttcaatttcaatggcctcaccggaacaggtgttttgacagaatctaacaaaaaattccttcccttccagcaattcgggagagat

SEQ ID NO: 496 - DNA, 723 bp, synthetic construct
  misc_feature 1..723: note = Synthetic
  source 1..723: mol_type = other DNA
cggttcccaaatatcactaatctttgccccttcggggaagtatttaacgctactcgatttgctagcgtatatgcctggaaccggaagagaataagcaactgtgttgcagactatagcgtgctttacaattccgcatcctttagtaccttcaaatgttacggtgtgagccccaccaaactcaatgatctctgtttcacaaacgtgtacgcagatagtttcgttatacgcggggacgaagtacggcagatagcccctggccagacaggaaagatagccgattacaactacaaacttccagacgattttacagggtgtgtgatcgcttggaattcaaataacctggactccaaagtgggaggcaactataattacctgtaccgactgttccgcaaaagcaacttgaaacctttcgagcgagatatatcaaccgaaatctaccaagctggttctacaccttgtaatggtgtggagggatttaactgctacttccctcttcagtcctatggatttcagcctacaaatggagtcgggtatcaaccctatagagtcgtggtgttgtcatttgaacttctccatgcacctgctactgtctgtggtccaaaaaagtccactaatcttgtaaaaaacaaatgcgtgaacttcaatttcaatggcctcaccggaacaggtgttttgacagaatctaacaaaaaattccttcccttccagcaattcgggagagat

SEQ ID NO: 497 - DNA, 720 bp, synthetic construct
  misc_feature 1..720: note = Synthetic
  source 1..720: mol_type = other DNA
ttcccaaatatcactaatctttgccccttcggggaagtatttaacgctactcgatttgctagcgtatatgcctggaaccggaagagaataagcaactgtgttgcagactatagcgtgctttacaattccgcatcctttagtaccttcaaatgttacggtgtgagccccaccaaactcaatgatctctgtttcacaaacgtgtacgcagatagtttcgttatacgcggggacgaagtacggcagatagcccctggccagacaggaaagatagccgattacaactacaaacttccagacgattttacagggtgtgtgatcgcttggaattcaaataacctggactccaaagtgggaggcaactataattacctgtaccgactgttccgcaaaagcaacttgaaacctttcgagcgagatatatcaaccgaaatctaccaagctggttctacaccttgtaatggtgtggagggatttaactgctacttccctcttcagtcctatggatttcagcctacaaatggagtcgggtatcaaccctatagagtcgtggtgttgtcatttgaacttctccatgcacctgctactgtctgtggtccaaaaaagtccactaatcttgtaaaaaacaaatgcgtgaacttcaatttcaatggcctcaccggaacaggtgttttgacagaatctaacaaaaaattccttcccttccagcaattcgggagagat

SEQ ID NO: 498 - DNA, 717 bp, synthetic construct
  misc_feature 1..717: note = Synthetic
  source 1..717: mol_type = other DNA
ccaaatatcactaatctttgccccttcggggaagtatttaacgctactcgatttgctagcgtatatgcctggaaccggaagagaataagcaactgtgttgcagactatagcgtgctttacaattccgcatcctttagtaccttcaaatgttacggtgtgagccccaccaaactcaatgatctctgtttcacaaacgtgtacgcagatagtttcgttatacgcggggacgaagtacggcagatagcccctggccagacaggaaagatagccgattacaactacaaacttccagacgattttacagggtgtgtgatcgcttggaattcaaataacctggactccaaagtgggaggcaactataattacctgtaccgactgttccgcaaaagcaacttgaaacctttcgagcgagatatatcaaccgaaatctaccaagctggttctacaccttgtaatggtgtggagggatttaactgctacttccctcttcagtcctatggatttcagcctacaaatggagtcgggtatcaaccctatagagtcgtggtgttgtcatttgaacttctccatgcacctgctactgtctgtggtccaaaaaagtccactaatcttgtaaaaaacaaatgcgtgaacttcaatttcaatggcctcaccggaacaggtgttttgacagaatctaacaaaaaattccttcccttccagcaattcgggagagat

SEQ ID NO: 499 - DNA, 714 bp, synthetic construct; identical to SEQ ID NO: 30
  misc_feature 1..714: note = Synthetic
  source 1..714: mol_type = other DNA

SEQ ID NO: 500 - DNA, 711 bp, synthetic construct
  misc_feature 1..711: note = Synthetic
  source 1..711: mol_type = other DNA
atcactaatctttgccccttcggggaagtatttaacgctactcgatttgctagcgtatatgcctggaaccggaagagaataagcaactgtgttgcagactatagcgtgctttacaattccgcatcctttagtaccttcaaatgttacggtgtgagccccaccaaactcaatgatctctgtttcacaaacgtgtacgcagatagtttcgttatacgcggggacgaagtacggcagatagcccctggccagacaggaaagatagccgattacaactacaaacttccagacgattttacagggtgtgtgatcgcttggaattcaaataacctggactccaaagtgggaggcaactataattacctgtaccgactgttccgcaaaagcaacttgaaacctttcgagcgagatatatcaaccgaaatctaccaagctggttctacaccttgtaatggtgtggagggatttaactgctacttccctcttcagtcctatggatttcagcctacaaatggagtcgggtatcaaccctatagagtcgtggtgttgtcatttgaacttctccatgcacctgctactgtctgtggtccaaaaaagtccactaatcttgtaaaaaacaaatgcgtgaacttcaatttcaatggcctcaccggaacaggtgttttgacagaatctaacaaaaaattccttcccttccagcaattcgggagagat

SEQ ID NO: 501 - DNA, 708 bp, synthetic construct
  misc_feature 1..708: note = Synthetic
  source 1..708: mol_type = other DNA
actaatctttgccccttcggggaagtatttaacgctactcgatttgctagcgtatatgcctggaaccggaagagaataagcaactgtgttgcagactatagcgtgctttacaattccgcatcctttagtaccttcaaatgttacggtgtgagccccaccaaactcaatgatctctgtttcacaaacgtgtacgcagatagtttcgttatacgcggggacgaagtacggcagatagcccctggccagacaggaaagatagccgattacaactacaaacttccagacgattttacagggtgtgtgatcgcttggaattcaaataacctggactccaaagtgggaggcaactataattacctgtaccgactgttccgcaaaagcaacttgaaacctttcgagcgagatatatcaaccgaaatctaccaagctggttctacaccttgtaatggtgtggagggatttaactgctacttccctcttcagtcctatggatttcagcctacaaatggagtcgggtatcaaccctatagagtcgtggtgttgtcatttgaacttctccatgcacctgctactgtctgtggtccaaaaaagtccactaatcttgtaaaaaacaaatgcgtgaacttcaatttcaatggcctcaccggaacaggtgttttgacagaatctaacaaaaaattccttcccttccagcaattcgggagagat

SEQ ID NO: 502 - DNA, 705 bp, synthetic construct
  misc_feature 1..705: note = Synthetic
  source 1..705: mol_type = other DNA
aatctttgccccttcggggaagtatttaacgctactcgatttgctagcgtatatgcctggaaccggaagagaataagcaactgtgttgcagactatagcgtgctttacaattccgcatcctttagtaccttcaaatgttacggtgtgagccccaccaaactcaatgatctctgtttcacaaacgtgtacgcagatagtttcgttatacgcggggacgaagtacggcagatagcccctggccagacaggaaagatagccgattacaactacaaacttccagacgattttacagggtgtgtgatcgcttggaattcaaataacctggactccaaagtgggaggcaactataattacctgtaccgactgttccgcaaaagcaacttgaaacctttcgagcgagatatatcaaccgaaatctaccaagctggttctacaccttgtaatggtgtggagggatttaactgctacttccctcttcagtcctatggatttcagcctacaaatggagtcgggtatcaaccctatagagtcgtggtgttgtcatttgaacttctccatgcacctgctactgtctgtggtccaaaaaagtccactaatcttgtaaaaaacaaatgcgtgaacttcaatttcaatggcctcaccggaacaggtgttttgacagaatctaacaaaaaattccttcccttccagcaattcgggagagat

SEQ ID NO: 503 - DNA, 702 bp, synthetic construct
  misc_feature 1..702: note = Synthetic
  source 1..702: mol_type = other DNA
ctttgccccttcggggaagtatttaacgctactcgatttgctagcgtatatgcctggaaccggaagagaataagcaactgtgttgcagactatagcgtgctttacaattccgcatcctttagtaccttcaaatgttacggtgtgagccccaccaaactcaatgatctctgtttcacaaacgtgtacgcagatagtttcgttatacgcggggacgaagtacggcagatagcccctggccagacaggaaagatagccgattacaactacaaacttccagacgattttacagggtgtgtgatcgcttggaattcaaataacctggactccaaagtgggaggcaactataattacctgtaccgactgttccgcaaaagcaacttgaaacctttcgagcgagatatatcaaccgaaatctaccaagctggttctacaccttgtaatggtgtggagggatttaactgctacttccctcttcagtcctatggatttcagcctacaaatggagtcgggtatcaaccctatagagtcgtggtgttgtcatttgaacttctccatgcacctgctactgtctgtggtccaaaaaagtccactaatcttgtaaaaaacaaatgcgtgaacttcaatttcaatggcctcaccggaacaggtgttttgacagaatctaacaaaaaattccttcccttccagcaattcgggagagat

SEQ ID NO: 504 - DNA, 699 bp, synthetic construct
  misc_feature 1..699: note = Synthetic
  source 1..699: mol_type = other DNA
tgccccttcggggaagtatttaacgctactcgatttgctagcgtatatgcctggaaccggaagagaataagcaactgtgttgcagactatagcgtgctttacaattccgcatcctttagtaccttcaaatgttacggtgtgagccccaccaaactcaatgatctctgtttcacaaacgtgtacgcagatagtttcgttatacgcggggacgaagtacggcagatagcccctggccagacaggaaagatagccgattacaactacaaacttccagacgattttacagggtgtgtgatcgcttggaattcaaataacctggactccaaagtgggaggcaactataattacctgtaccgactgttccgcaaaagcaacttgaaacctttcgagcgagatatatcaaccgaaatctaccaagctggttctacaccttgtaatggtgtggagggatttaactgctacttccctcttcagtcctatggatttcagcctacaaatggagtcgggtatcaaccctatagagtcgtggtgttgtcatttgaacttctccatgcacctgctactgtctgtggtccaaaaaagtccactaatcttgtaaaaaacaaatgcgtgaacttcaatttcaatggcctcaccggaacaggtgttttgacagaatctaacaaaaaattccttcccttccagcaattcgggagagat

SEQ ID NO: 505 - DNA, 696 bp, synthetic construct
  misc_feature 1..696: note = Synthetic
  source 1..696: mol_type = other DNA
cccttcggggaagtatttaacgctactcgatttgctagcgtatatgcctggaaccggaagagaataagcaactgtgttgcagactatagcgtgctttacaattccgcatcctttagtaccttcaaatgttacggtgtgagccccaccaaactcaatgatctctgtttcacaaacgtgtacgcagatagtttcgttatacgcggggacgaagtacggcagatagcccctggccagacaggaaagatagccgattacaactacaaacttccagacgattttacagggtgtgtgatcgcttggaattcaaataacctggactccaaagtgggaggcaactataattacctgtaccgactgttccgcaaaagcaacttgaaacctttcgagcgagatatatcaaccgaaatctaccaagctggttctacaccttgtaatggtgtggagggatttaactgctacttccctcttcagtcctatggatttcagcctacaaatggagtcgggtatcaaccctatagagtcgtggtgttgtcatttgaacttctccatgcacctgctactgtctgtggtccaaaaaagtccactaatcttgtaaaaaacaaatgcgtgaacttcaatttcaatggcctcaccggaacaggtgttttgacagaatctaacaaaaaattccttcccttccagcaattcgggagagat

SEQ ID NO: 506 - DNA, 693 bp, synthetic construct
  misc_feature 1..693: note = Synthetic
  source 1..693: mol_type = other DNA
ttcggggaagtatttaacgctactcgatttgctagcgtatatgcctggaaccggaagagaataagcaactgtgttgcagactatagcgtgctttacaattccgcatcctttagtaccttcaaatgttacggtgtgagccccaccaaactcaatgatctctgtttcacaaacgtgtacgcagatagtttcgttatacgcggggacgaagtacggcagatagcccctggccagacaggaaagatagccgattacaactacaaacttccagacgattttacagggtgtgtgatcgcttggaattcaaataacctggactccaaagtgggaggcaactataattacctgtaccgactgttccgcaaaagcaacttgaaacctttcgagcgagatatatcaaccgaaatctaccaagctggttctacaccttgtaatggtgtggagggatttaactgctacttccctcttcagtcctatggatttcagcctacaaatggagtcgggtatcaaccctatagagtcgtggtgttgtcatttgaacttctccatgcacctgctactgtctgtggtccaaaaaagtccactaatcttgtaaaaaacaaatgcgtgaacttcaatttcaatggcctcaccggaacaggtgttttgacagaatctaacaaaaaattccttcccttccagcaattcgggagagat

SEQ ID NO: 507 - DNA, 690 bp, synthetic construct
  misc_feature 1..690: note = Synthetic
  source 1..690: mol_type = other DNA
ggggaagtatttaacgctactcgatttgctagcgtatatgcctggaaccggaagagaataagcaactgtgttgcagactatagcgtgctttacaattccgcatcctttagtaccttcaaatgttacggtgtgagccccaccaaactcaatgatctctgtttcacaaacgtgtacgcagatagtttcgttatacgcggggacgaagtacggcagatagcccctggccagacaggaaagatagccgattacaactacaaacttccagacgattttacagggtgtgtgatcgcttggaattcaaataacctggactccaaagtgggaggcaactataattacctgtaccgactgttccgcaaaagcaacttgaaacctttcgagcgagatatatcaaccgaaatctaccaagctggttctacaccttgtaatggtgtggagggatttaactgctacttccctcttcagtcctatggatttcagcctacaaatggagtcgggtatcaaccctatagagtcgtggtgttgtcatttgaacttctccatgcacctgctactgtctgtggtccaaaaaagtccactaatcttgtaaaaaacaaatgcgtgaacttcaatttcaatggcctcaccggaacaggtgttttgacagaatctaacaaaaaattccttcccttccagcaattcgggagagat

SEQ ID NO: 508 - DNA, 687 bp, synthetic construct
  misc_feature 1..687: note = Synthetic
  source 1..687: mol_type = other DNA
gaagtatttaacgctactcgatttgctagcgtatatgcctggaaccggaagagaataagcaactgtgttgcagactatagcgtgctttacaattccgcatcctttagtaccttcaaatgttacggtgtgagccccaccaaactcaatgatctctgtttcacaaacgtgtacgcagatagtttcgttatacgcggggacgaagtacggcagatagcccctggccagacaggaaagatagccgattacaactacaaacttccagacgattttacagggtgtgtgatcgcttggaattcaaataacctggactccaaagtgggaggcaactataattacctgtaccgactgttccgcaaaagcaacttgaaacctttcgagcgagatatatcaaccgaaatctaccaagctggttctacaccttgtaatggtgtggagggatttaactgctacttccctcttcagtcctatggatttcagcctacaaatggagtcgggtatcaaccctatagagtcgtggtgttgtcatttgaacttctccatgcacctgctactgtctgtggtccaaaaaagtccactaatcttgtaaaaaacaaatgcgtgaacttcaatttcaatggcctcaccggaacaggtgttttgacagaatctaacaaaaaattccttcccttccagcaattcgggagagat

SEQ ID NO: 509 - DNA, 684 bp, synthetic construct
  misc_feature 1..684: note = Synthetic
  source 1..684: mol_type = other DNA
gtatttaacgctactcgatttgctagcgtatatgcctggaaccggaagagaataagcaactgtgttgcagactatagcgtgctttacaattccgcatcctttagtaccttcaaatgttacggtgtgagccccaccaaactcaatgatctctgtttcacaaacgtgtacgcagatagtttcgttatacgcggggacgaagtacggcagatagcccctggccagacaggaaagatagccgattacaactacaaacttccagacgattttacagggtgtgtgatcgcttggaattcaaataacctggactccaaagtgggaggcaactataattacctgtaccgactgttccgcaaaagcaacttgaaacctttcgagcgagatatatcaaccgaaatctaccaagctggttctacaccttgtaatggtgtggagggatttaactgctacttccctcttcagtcctatggatttcagcctacaaatggagtcgggtatcaaccctatagagtcgtggtgttgtcatttgaacttctccatgcacctgctactgtctgtggtccaaaaaagtccactaatcttgtaaaaaacaaatgcgtgaacttcaatttcaatggcctcaccggaacaggtgttttgacagaatctaacaaaaaattccttcccttccagcaattcgggagagat

SEQ ID NO: 510 - DNA, 681 bp, synthetic construct
  misc_feature 1..681: note = Synthetic
  source 1..681: mol_type = other DNA
tttaacgctactcgatttgctagcgtatatgcctggaaccggaagagaataagcaactgtgttgcagactatagcgtgctttacaattccgcatcctttagtaccttcaaatgttacggtgtgagccccaccaaactcaatgatctctgtttcacaaacgtgtacgcagatagtttcgttatacgcggggacgaagtacggcagatagcccctggccagacaggaaagatagccgattacaactacaaacttccagacgattttacagggtgtgtgatcgcttggaattcaaataacctggactccaaagtgggaggcaactataattacctgtaccgactgttccgcaaaagcaacttgaaacctttcgagcgagatatatcaaccgaaatctaccaagctggttctacaccttgtaatggtgtggagggatttaactgctacttccctcttcagtcctatggatttcagcctacaaatggagtcgggtatcaaccctatagagtcgtggtgttgtcatttgaacttctccatgcacctgctactgtctgtggtccaaaaaagtccactaatcttgtaaaaaacaaatgcgtgaacttcaatttcaatggcctcaccggaacaggtgttttgacagaatctaacaaaaaattccttcccttccagcaattcgggagagat

SEQ ID NO: 511 - DNA, 678 bp, synthetic construct
  misc_feature 1..678: note = Synthetic
  source 1..678: mol_type = other DNA
aacgctactcgatttgctagcgtatatgcctggaaccggaagagaataagcaactgtgttgcagactatagcgtgctttacaattccgcatcctttagtaccttcaaatgttacggtgtgagccccaccaaactcaatgatctctgtttcacaaacgtgtacgcagatagtttcgttatacgcggggacgaagtacggcagatagcccctggccagacaggaaagatagccgattacaactacaaacttccagacgattttacagggtgtgtgatcgcttggaattcaaataacctggactccaaagtgggaggcaactataattacctgtaccgactgttccgcaaaagcaacttgaaacctttcgagcgagatatatcaaccgaaatctaccaagctggttctacaccttgtaatggtgtggagggatttaactgctacttccctcttcagtcctatggatttcagcctacaaatggagtcgggtatcaaccctatagagtcgtggtgttgtcatttgaacttctccatgcacctgctactgtctgtggtccaaaaaagtccactaatcttgtaaaaaacaaatgcgtgaacttcaatttcaatggcctcaccggaacaggtgttttgacagaatctaacaaaaaattccttcccttccagcaattcgggagagat

SEQ ID NO: 512 - DNA, 675 bp, synthetic construct
  misc_feature 1..675: note = Synthetic
  source 1..675: mol_type = other DNA
gctactcgatttgctagcgtatatgcctggaaccggaagagaataagcaactgtgttgcagactatagcgtgctttacaattccgcatcctttagtaccttcaaatgttacggtgtgagccccaccaaactcaatgatctctgtttcacaaacgtgtacgcagatagtttcgttatacgcggggacgaagtacggcagatagcccctggccagacaggaaagatagccgattacaactacaaacttccagacgattttacagggtgtgtgatcgcttggaattcaaataacctggactccaaagtgggaggcaactataattacctgtaccgactgttccgcaaaagcaacttgaaacctttcgagcgagatatatcaaccgaaatctaccaagctggttctacaccttgtaatggtgtggagggatttaactgctacttccctcttcagtcctatggatttcagcctacaaatggagtcgggtatcaaccctatagagtcgtggtgttgtcatttgaacttctccatgcacctgctactgtctgtggtccaaaaaagtccactaatcttgtaaaaaacaaatgcgtgaacttcaatttcaatggcctcaccggaacaggtgttttgacagaatctaacaaaaaattccttcccttccagcaattcgggagagat

SEQ ID NO: 513 - DNA, 672 bp, synthetic construct
  misc_feature 1..672: note = Synthetic
  source 1..672: mol_type = other DNA
actcgatttgctagcgtatatgcctggaaccggaagagaataagcaactgtgttgcagactatagcgtgctttacaattccgcatcctttagtaccttcaaatgttacggtgtgagccccaccaaactcaatgatctctgtttcacaaacgtgtacgcagatagtttcgttatacgcggggacgaagtacggcagatagcccctggccagacaggaaagatagccgattacaactacaaacttccagacgattttacagggtgtgtgatcgcttggaattcaaataacctggactccaaagtgggaggcaactataattacctgtaccgactgttccgcaaaagcaacttgaaacctttcgagcgagatatatcaaccgaaatctaccaagctggttctacaccttgtaatggtgtggagggatttaactgctacttccctcttcagtcctatggatttcagcctacaaatggagtcgggtatcaaccctatagagtcgtggtgttgtcatttgaacttctccatgcacctgctactgtctgtggtccaaaaaagtccactaatcttgtaaaaaacaaatgcgtgaacttcaatttcaatggcctcaccggaacaggtgttttgacagaatctaacaaaaaattccttcccttccagcaattcgggagagat

SEQ ID NO: 514 - DNA, 669 bp, synthetic construct
  misc_feature 1..669: note = Synthetic
  source 1..669: mol_type = other DNA
cgatttgctagcgtatatgcctggaaccggaagagaataagcaactgtgttgcagactatagcgtgctttacaattccgcatcctttagtaccttcaaatgttacggtgtgagccccaccaaactcaatgatctctgtttcacaaacgtgtacgcagatagtttcgttatacgcggggacgaagtacggcagatagcccctggccagacaggaaagatagccgattacaactacaaacttccagacgattttacagggtgtgtgatcgcttggaattcaaataacctggactccaaagtgggaggcaactataattacctgtaccgactgttccgcaaaagcaacttgaaacctttcgagcgagatatatcaaccgaaatctaccaagctggttctacaccttgtaatggtgtggagggatttaactgctacttccctcttcagtcctatggatttcagcctacaaatggagtcgggtatcaaccctatagagtcgtggtgttgtcatttgaacttctccatgcacctgctactgtctgtggtccaaaaaagtccactaatcttgtaaaaaacaaatgcgtgaacttcaatttcaatggcctcaccggaacaggtgttttgacagaatctaacaaaaaattccttcccttccagcaattcgggagagat

SEQ ID NO: 515 - DNA, 666 bp, synthetic construct
  misc_feature 1..666: note = Synthetic
  source 1..666: mol_type = other DNA
tttgctagcgtatatgcctggaaccggaagagaataagcaactgtgttgcagactatagcgtgctttacaattccgcatcctttagtaccttcaaatgttacggtgtgagccccaccaaactcaatgatctctgtttcacaaacgtgtacgcagatagtttcgttatacgcggggacgaagtacggcagatagcccctggccagacaggaaagatagccgattacaactacaaacttccagacgattttacagggtgtgtgatcgcttggaattcaaataacctggactccaaagtgggaggcaactataattacctgtaccgactgttccgcaaaagcaacttgaaacctttcgagcgagatatatcaaccgaaatctaccaagctggttctacaccttgtaatggtgtggagggatttaactgctacttccctcttcagtcctatggatttcagcctacaaatggagtcgggtatcaaccctatagagtcgtggtgttgtcatttgaacttctccatgcacctgctactgtctgtggtccaaaaaagtccactaatcttgtaaaaaacaaatgcgtgaacttcaatttcaatggcctcaccggaacaggtgttttgacagaatctaacaaaaaattccttcccttccagcaattcgggagagat

SEQ ID NO: 516 - DNA, 663 bp, synthetic construct
  misc_feature 1..663: note = Synthetic
  source 1..663: mol_type = other DNA
gctagcgtatatgcctggaaccggaagagaataagcaactgtgttgcagactatagcgtgctttacaattccgcatcctttagtaccttcaaatgttacggtgtgagccccaccaaactcaatgatctctgtttcacaaacgtgtacgcagatagtttcgttatacgcggggacgaagtacggcagatagcccctggccagacaggaaagatagccgattacaactacaaacttccagacgattttacagggtgtgtgatcgcttggaattcaaataacctggactccaaagtgggaggcaactataattacctgtaccgactgttccgcaaaagcaacttgaaacctttcgagcgagatatatcaaccgaaatctaccaagctggttctacaccttgtaatggtgtggagggatttaactgctacttccctcttcagtcctatggatttcagcctacaaatggagtcgggtatcaaccctatagagtcgtggtgttgtcatttgaacttctccatgcacctgctactgtctgtggtccaaaaaagtccactaatcttgtaaaaaacaaatgcgtgaacttcaatttcaatggcctcaccggaacaggtgttttgacagaatctaacaaaaaattccttcccttccagcaattcgggagagat

SEQ ID NO: 517 - DNA, 660 bp, synthetic construct
  misc_feature 1..660: note = Synthetic
  source 1..660: mol_type = other DNA
agcgtatatgcctggaaccggaagagaataagcaactgtgttgcagactatagcgtgctttacaattccgcatcctttagtaccttcaaatgttacggtgtgagccccaccaaactcaatgatctctgtttcacaaacgtgtacgcagatagtttcgttatacgcggggacgaagtacggcagatagcccctggccagacaggaaagatagccgattacaactacaaacttccagacgattttacagggtgtgtgatcgcttggaattcaaataacctggactccaaagtgggaggcaactataattacctgtaccgactgttccgcaaaagcaacttgaaacctttcgagcgagatatatcaaccgaaatctaccaagctggttctacaccttgtaatggtgtggagggatttaactgctacttccctcttcagtcctatggatttcagcctacaaatggagtcgggtatcaaccctatagagtcgtggtgttgtcatttgaacttctccatgcacctgctactgtctgtggtccaaaaaagtccactaatcttgtaaaaaacaaatgcgtgaacttcaatttcaatggcctcaccggaacaggtgttttgacagaatctaacaaaaaattccttcccttccagcaattcgggagagat

SEQ ID NO: 518 - DNA, 657 bp, synthetic construct
  misc_feature 1..657: note = Synthetic
  source 1..657: mol_type = other DNA
gtatatgcctggaaccggaagagaataagcaactgtgttgcagactatagcgtgctttacaattccgcatcctttagtaccttcaaatgttacggtgtgagccccaccaaactcaatgatctctgtttcacaaacgtgtacgcagatagtttcgttatacgcggggacgaagtacggcagatagcccctggccagacaggaaagatagccgattacaactacaaacttccagacgattttacagggtgtgtgatcgcttggaattcaaataacctggactccaaagtgggaggcaactataattacctgtaccgactgttccgcaaaagcaacttgaaacctttcgagcgagatatatcaaccgaaatctaccaagctggttctacaccttgtaatggtgtggagggatttaactgctacttccctcttcagtcctatggatttcagcctacaaatggagtcgggtatcaaccctatagagtcgtggtgttgtcatttgaacttctccatgcacctgctactgtctgtggtccaaaaaagtccactaatcttgtaaaaaacaaatgcgtgaacttcaatttcaatggcctcaccggaacaggtgttttgacagaatctaacaaaaaattccttcccttccagcaattcgggagagat

SEQ ID NO: 519 - DNA, 654 bp, synthetic construct
  misc_feature 1..654: note = Synthetic
  source 1..654: mol_type = other DNA
tatgcctggaaccggaagagaataagcaactgtgttgcagactatagcgtgctttacaattccgcatcctttagtaccttcaaatgttacggtgtgagccccaccaaactcaatgatctctgtttcacaaacgtgtacgcagatagtttcgttatacgcggggacgaagtacggcagatagcccctggccagacaggaaagatagccgattacaactacaaacttccagacgattttacagggtgtgtgatcgcttggaattcaaataacctggactccaaagtgggaggcaactataattacctgtaccgactgttccgcaaaagcaacttgaaacctttcgagcgagatatatcaaccgaaatctaccaagctggttctacaccttgtaatggtgtggagggatttaactgctacttccctcttcagtcctatggatttcagcctacaaatggagtcgggtatcaaccctatagagtcgtggtgttgtcatttgaacttctccatgcacctgctactgtctgtggtccaaaaaagtccactaatcttgtaaaaaacaaatgcgtgaacttcaatttcaatggcctcaccggaacaggtgttttgacagaatctaacaaaaaattccttcccttccagcaattcgggagagat

SEQ ID NO: 520 - DNA, 651 bp, synthetic construct
  misc_feature 1..651: note = Synthetic
  source 1..651: mol_type = other DNA
gcctggaaccggaagagaataagcaactgtgttgcagactatagcgtgctttacaattccgcatcctttagtaccttcaaatgttacggtgtgagccccaccaaactcaatgatctctgtttcacaaacgtgtacgcagatagtttcgttatacgcggggacgaagtacggcagatagcccctggccagacaggaaagatagccgattacaactacaaacttccagacgattttacagggtgtgtgatcgcttggaattcaaataacctggactccaaagtgggaggcaactataattacctgtaccgactgttccgcaaaagcaacttgaaacctttcgagcgagatatatcaaccgaaatctaccaagctggttctacaccttgtaatggtgtggagggatttaactgctacttccctcttcagtcctatggatttcagcctacaaatggagtcgggtatcaaccctatagagtcgtggtgttgtcatttgaacttctccatgcacctgctactgtctgtggtccaaaaaagtccactaatcttgtaaaaaacaaatgcgtgaacttcaatttcaatggcctcaccggaacaggtgttttgacagaatctaacaaaaaattccttcccttccagcaattcgggagagat

SEQ ID NO: 521 - DNA, 648 bp, synthetic construct
  misc_feature 1..648: note = Synthetic
  source 1..648: mol_type = other DNA
tggaaccggaagagaataagcaactgtgttgcagactatagcgtgctttacaattccgcatcctttagtaccttcaaatgttacggtgtgagccccaccaaactcaatgatctctgtttcacaaacgtgtacgcagatagtttcgttatacgcggggacgaagtacggcagatagcccctggccagacaggaaagatagccgattacaactacaaacttccagacgattttacagggtgtgtgatcgcttggaattcaaataacctggactccaaagtgggaggcaactataattacctgtaccgactgttccgcaaaagcaacttgaaacctttcgagcgagatatatcaaccgaaatctaccaagctggttctacaccttgtaatggtgtggagggatttaactgctacttccctcttcagtcctatggatttcagcctacaaatggagtcgggtatcaaccctatagagtcgtggtgttgtcatttgaacttctccatgcacctgctactgtctgtggtccaaaaaagtccactaatcttgtaaaaaacaaatgcgtgaacttcaatttcaatggcctcaccggaacaggtgttttgacagaatctaacaaaaaattccttcccttccagcaattcgggagagat

SEQ ID NO: 522 - DNA, 645 bp, synthetic construct
  misc_feature 1..645: note = Synthetic
  source 1..645: mol_type = other DNA
aaccggaagagaataagcaactgtgttgcagactatagcgtgctttacaattccgcatcctttagtaccttcaaatgttacggtgtgagccccaccaaactcaatgatctctgtttcacaaacgtgtacgcagatagtttcgttatacgcggggacgaagtacggcagatagcccctggccagacaggaaagatagccgattacaactacaaacttccagacgattttacagggtgtgtgatcgcttggaattcaaataacctggactccaaagtgggaggcaactataattacctgtaccgactgttccgcaaaagcaacttgaaacctttcgagcgagatatatcaaccgaaatctaccaagctggttctacaccttgtaatggtgtggagggatttaactgctacttccctcttcagtcctatggatttcagcctacaaatggagtcgggtatcaaccctatagagtcgtggtgttgtcatttgaacttctccatgcacctgctactgtctgtggtccaaaaaagtccactaatcttgtaaaaaacaaatgcgtgaacttcaatttcaatggcctcaccggaacaggtgttttgacagaatctaacaaaaaattccttcccttccagcaattcgggagagat

SEQ ID NO: 523 - DNA, 642 bp, synthetic construct
  misc_feature 1..642: note = Synthetic
  source 1..642: mol_type = other DNA
cggaagagaataagcaactgtgttgcagactatagcgtgctttacaattccgcatcctttagtaccttcaaatgttacggtgtgagccccaccaaactcaatgatctctgtttcacaaacgtgtacgcagatagtttcgttatacgcggggacgaagtacggcagatagcccctggccagacaggaaagatagccgattacaactacaaacttccagacgattttacagggtgtgtgatcgcttggaattcaaataacctggactccaaagtgggaggcaactataattacctgtaccgactgttccgcaaaagcaacttgaaacctttcgagcgagatatatcaaccgaaatctaccaagctggttctacaccttgtaatggtgtggagggatttaactgctacttccctcttcagtcctatggatttcagcctacaaatggagtcgggtatcaaccctatagagtcgtggtgttgtcatttgaacttctccatgcacctgctactgtctgtggtccaaaaaagtccactaatcttgtaaaaaacaaatgcgtgaacttcaatttcaatggcctcaccggaacaggtgttttgacagaatctaacaaaaaattccttcccttccagcaattcgggagagat

SEQ ID NO: 524 - DNA, 639 bp, synthetic construct
  misc_feature 1..639: note = Synthetic
  source 1..639: mol_type = other DNA
aagagaataagcaactgtgttgcagactatagcgtgctttacaattccgcatcctttagtaccttcaaatgttacggtgtgagccccaccaaactcaatgatctctgtttcacaaacgtgtacgcagatagtttcgttatacgcggggacgaagtacggcagatagcccctggccagacaggaaagatagccgattacaactacaaacttccagacgattttacagggtgtgtgatcgcttggaattcaaataacctggactccaaagtgggaggcaactataattacctgtaccgactgttccgcaaaagcaacttgaaacctttcgagcgagatatatcaaccgaaatctaccaagctggttctacaccttgtaatggtgtggagggatttaactgctacttccctcttcagtcctatggatttcagcctacaaatggagtcgggtatcaaccctatagagtcgtggtgttgtcatttgaacttctccatgcacctgctactgtctgtggtccaaaaaagtccactaatcttgtaaaaaacaaatgcgtgaacttcaatttcaatggcctcaccggaacaggtgttttgacagaatctaacaaaaaattccttcccttccagcaattcgggagagat

SEQ ID NO: 525 - DNA, 636 bp, synthetic construct
  misc_feature 1..636: note = Synthetic
  source 1..636: mol_type = other DNA
agaataagcaactgtgttgcagactatagcgtgctttacaattccgcatcctttagtaccttcaaatgttacggtgtgagccccaccaaactcaatgatctctgtttcacaaacgtgtacgcagatagtttcgttatacgcggggacgaagtacggcagatagcccctggccagacaggaaagatagccgattacaactacaaacttccagacgattttacagggtgtgtgatcgcttggaattcaaataacctggactccaaagtgggaggcaactataattacctgtaccgactgttccgcaaaagcaacttgaaacctttcgagcgagatatatcaaccgaaatctaccaagctggttctacaccttgtaatggtgtggagggatttaactgctacttccctcttcagtcctatggatttcagcctacaaatggagtcgggtatcaaccctatagagtcgtggtgttgtcatttgaacttctccatgcacctgctactgtctgtggtccaaaaaagtccactaatcttgtaaaaaacaaatgcgtgaacttcaatttcaatggcctcaccggaacaggtgttttgacagaatctaacaaaaaattccttcccttccagcaattcgggagagat

SEQ ID NO: 526 - DNA, 633 bp, synthetic construct
  misc_feature 1..633: note = Synthetic
  source 1..633: mol_type = other DNA
ataagcaactgtgttgcagactatagcgtgctttacaattccgcatcctttagtaccttcaaatgttacggtgtgagccccaccaaactcaatgatctctgtttcacaaacgtgtacgcagatagtttcgttatacgcggggacgaagtacggcagatagcccctggccagacaggaaagatagccgattacaactacaaacttccagacgattttacagggtgtgtgatcgcttggaattcaaataacctggactccaaagtgggaggcaactataattacctgtaccgactgttccgcaaaagcaacttgaaacctttcgagcgagatatatcaaccgaaatctaccaagctggttctacaccttgtaatggtgtggagggatttaactgctacttccctcttcagtcctatggatttcagcctacaaatggagtcgggtatcaaccctatagagtcgtggtgttgtcatttgaacttctccatgcacctgctactgtctgtggtccaaaaaagtccactaatcttgtaaaaaacaaatgcgtgaacttcaatttcaatggcctcaccggaacaggtgttttgacagaatctaacaaaaaattccttcccttccagcaattcgggagagat

SEQ ID NO: 527 - DNA, 630 bp, synthetic construct
  misc_feature 1..630: note = Synthetic
  source 1..630: mol_type = other DNA
agcaactgtgttgcagactatagcgtgctttacaattccgcatcctttagtaccttcaaatgttacggtgtgagccccaccaaactcaatgatctctgtttcacaaacgtgtacgcagatagtttcgttatacgcggggacgaagtacggcagatagcccctggccagacaggaaagatagccgattacaactacaaacttccagacgattttacagggtgtgtgatcgcttggaattcaaataacctggactccaaagtgggaggcaactataattacctgtaccgactgttccgcaaaagcaacttgaaacctttcgagcgagatatatcaaccgaaatctaccaagctggttctacaccttgtaatggtgtggagggatttaactgctacttccctcttcagtcctatggatttcagcctacaaatggagtcgggtatcaaccctatagagtcgtggtgttgtcatttgaacttctccatgcacctgctactgtctgtggtccaaaaaagtccactaatcttgtaaaaaacaaatgcgtgaacttcaatttcaatggcctcaccggaacaggtgttttgacagaatctaacaaaaaattccttcccttccagcaattcgggagagat

SEQ ID NO: 528 - DNA, 627 bp, synthetic construct
  misc_feature 1..627: note = Synthetic
  source 1..627: mol_type = other DNA
aactgtgttgcagactatagcgtgctttacaattccgcatcctttagtaccttcaaatgttacggtgtgagccccaccaaactcaatgatctctgtttcacaaacgtgtacgcagatagtttcgttatacgcggggacgaagtacggcagatagcccctggccagacaggaaagatagccgattacaactacaaacttccagacgattttacagggtgtgtgatcgcttggaattcaaataacctggactccaaagtgggaggcaactataattacctgtaccgactgttccgcaaaagcaacttgaaacctttcgagcgagatatatcaaccgaaatctaccaagctggttctacaccttgtaatggtgtggagggatttaactgctacttccctcttcagtcctatggatttcagcctacaaatggagtcgggtatcaaccctatagagtcgtggtgttgtcatttgaacttctccatgcacctgctactgtctgtggtccaaaaaagtccactaatcttgtaaaaaacaaatgcgtgaacttcaatttcaatggcctcaccggaacaggtgttttgacagaatctaacaaaaaattccttcccttccagcaattcgggagagat

SEQ ID NO: 529 - DNA, 624 bp, synthetic construct
  misc_feature 1..624: note = Synthetic
  source 1..624: mol_type = other DNA
tgtgttgcagactatagcgtgctttacaattccgcatcctttagtaccttcaaatgttacggtgtgagccccaccaaactcaatgatctctgtttcacaaacgtgtacgcagatagtttcgttatacgcggggacgaagtacggcagatagcccctggccagacaggaaagatagccgattacaactacaaacttccagacgattttacagggtgtgtgatcgcttggaattcaaataacctggactccaaagtgggaggcaactataattacctgtaccgactgttccgcaaaagcaacttgaaacctttcgagcgagatatatcaaccgaaatctaccaagctggttctacaccttgtaatggtgtggagggatttaactgctacttccctcttcagtcctatggatttcagcctacaaatggagtcgggtatcaaccctatagagtcgtggtgttgtcatttgaacttctccatgcacctgctactgtctgtggtccaaaaaagtccactaatcttgtaaaaaacaaatgcgtgaacttcaatttcaatggcctcaccggaacaggtgttttgacagaatctaacaaaaaattccttcccttccagcaattcgggagagat

SEQ ID NO: 530 - DNA, 621 bp, synthetic construct
  misc_feature 1..621: note = Synthetic
  source 1..621: mol_type = other DNA
gttgcagactatagcgtgctttacaattccgcatcctttagtaccttcaaatgttacggtgtgagccccaccaaactcaatgatctctgtttcacaaacgtgtacgcagatagtttcgttatacgcggggacgaagtacggcagatagcccctggccagacaggaaagatagccgattacaactacaaacttccagacgattttacagggtgtgtgatcgcttggaattcaaataacctggactccaaagtgggaggcaactataattacctgtaccgactgttccgcaaaagcaacttgaaacctttcgagcgagatatatcaaccgaaatctaccaagctggttctacaccttgtaatggtgtggagggatttaactgctacttccctcttcagtcctatggatttcagcctacaaatggagtcgggtatcaaccctatagagtcgtggtgttgtcatttgaacttctccatgcacctgctactgtctgtggtccaaaaaagtccactaatcttgtaaaaaacaaatgcgtgaacttcaatttcaatggcctcaccggaacaggtgttttgacagaatctaacaaaaaattccttcccttccagcaattcgggagagat

SEQ ID NO: 531 - DNA, 618 bp, synthetic construct
  misc_feature 1..618: note = Synthetic
  source 1..618: mol_type = other DNA
gcagactatagcgtgctttacaattccgcatcctttagtaccttcaaatgttacggtgtgagccccaccaaactcaatgatctctgtttcacaaacgtgtacgcagatagtttcgttatacgcggggacgaagtacggcagatagcccctggccagacaggaaagatagccgattacaactacaaacttccagacgattttacagggtgtgtgatcgcttggaattcaaataacctggactccaaagtgggaggcaactataattacctgtaccgactgttccgcaaaagcaacttgaaacctttcgagcgagatatatcaaccgaaatctaccaagctggttctacaccttgtaatggtgtggagggatttaactgctacttccctcttcagtcctatggatttcagcctacaaatggagtcgggtatcaaccctatagagtcgtggtgttgtcatttgaacttctccatgcacctgctactgtctgtggtccaaaaaagtccactaatcttgtaaaaaacaaatgcgtgaacttcaatttcaatggcctcaccggaacaggtgttttgacagaatctaacaaaaaattccttcccttccagcaattcgggagagat

SEQ ID NO: 532 - DNA, 615 bp, synthetic construct
  misc_feature 1..615: note = Synthetic
  source 1..615: mol_type = other DNA
gactatagcgtgctttacaattccgcatcctttagtaccttcaaatgttacggtgtgagccccaccaaactcaatgatctctgtttcacaaacgtgtacgcagatagtttcgttatacgcggggacgaagtacggcagatagcccctggccagacaggaaagatagccgattacaactacaaacttccagacgattttacagggtgtgtgatcgcttggaattcaaataacctggactccaaagtgggaggcaactataattacctgtaccgactgttccgcaaaagcaacttgaaacctttcgagcgagatatatcaaccgaaatctaccaagctggttctacaccttgtaatggtgtggagggatttaactgctacttccctcttcagtcctatggatttcagcctacaaatggagtcgggtatcaaccctatagagtcgtggtgttgtcatttgaacttctccatgcacctgctactgtctgtggtccaaaaaagtccactaatcttgtaaaaaacaaatgcgtgaacttcaatttcaatggcctcaccggaacaggtgttttgacagaatctaacaaaaaattccttcccttccagcaattcgggagagat

SEQ ID NO: 533 - DNA, 612 bp, synthetic construct
  misc_feature 1..612: note = Synthetic
  source 1..612: mol_type = other DNA
tatagcgtgctttacaattccgcatcctttagtaccttcaaatgttacggtgtgagccccaccaaactcaatgatctctgtttcacaaacgtgtacgcagatagtttcgttatacgcggggacgaagtacggcagatagcccctggccagacaggaaagatagccgattacaactacaaacttccagacgattttacagggtgtgtgatcgcttggaattcaaataacctggactccaaagtgggaggcaactataattacctgtaccgactgttccgcaaaagcaacttgaaacctttcgagcgagatatatcaaccgaaatctaccaagctggttctacaccttgtaatggtgtggagggatttaactgctacttccctcttcagtcctatggatttcagcctacaaatggagtcgggtatcaaccctatagagtcgtggtgttgtcatttgaacttctccatgcacctgctactgtctgtggtccaaaaaagtccactaatcttgtaaaaaacaaatgcgtgaacttcaatttcaatggcctcaccggaacaggtgttttgacagaatctaacaaaaaattccttcccttccagcaattcgggagagat

SEQ ID NO: 534 - DNA, 609 bp, synthetic construct
  misc_feature 1..609: note = Synthetic
  source 1..609: mol_type = other DNA
agcgtgctttacaattccgcatcctttagtaccttcaaatgttacggtgtgagccccaccaaactcaatgatctctgtttcacaaacgtgtacgcagatagtttcgttatacgcggggacgaagtacggcagatagcccctggccagacaggaaagatagccgattacaactacaaacttccagacgattttacagggtgtgtgatcgcttggaattcaaataacctggactccaaagtgggaggcaactataattacctgtaccgactgttccgcaaaagcaacttgaaacctttcgagcgagatatatcaaccgaaatctaccaagctggttctacaccttgtaatggtgtggagggatttaactgctacttccctcttcagtcctatggatttcagcctacaaatggagtcgggtatcaaccctatagagtcgtggtgttgtcatttgaacttctccatgcacctgctactgtctgtggtccaaaaaagtccactaatcttgtaaaaaacaaatgcgtgaacttcaatttcaatggcctcaccggaacaggtgttttgacagaatctaacaaaaaattccttcccttccagcaattcgggagagat

SEQ ID NO: 535 - protein, 489 aa, synthetic construct
  REGION 1..489: note = Synthetic
RVQPTESIVRFPNITNLCPFGEVFNATRFASVYAWNRKRISNCVADYSVLYNSASFSTFKCYGVSPTKLNDLCFTNVYADSFVIRGDEVRQIAPGQTGKIADYNYKLPDDFTGCVIAWNSNNLDSKVGGNYNYLYRLFRKSNLKPFERDISTEIYQAGSTPCNGVEGFNCYFPLQSYGFQPTNGVGYQPYRVVVLSFELLHAPATVCGPKKSTNLVKNKCVNFNFNGLTGTGVLTESNKKFLPFQQFGRGSGGGGDGGGGSGDKTHTCPPCPAPELLGGPSVFLFPPKPKDTLMISRTPEVTCVVVDVSHEDPEVKFNWYVDGVEVHNAKTKPREEQYNSTYRVVSVLTVLHQDWLNGKEYKCKVSNKALPAPIEKTISKAKGQPREPQVYTLPPSREELTKNQVSLTCLVKGFYPSDIAVEWESNGQPENNYKTTPPVLDSDGSFFLYSKLTVDKSRWQQGNVFSCSVMHEALHNHYTQKSLSLSPGS

SEQ ID NO: 536 - protein, 488 aa, synthetic construct
  REGION 1..488: note = Synthetic
RVQPTESIVRFPNITNLCPFGEVFNATRFASVYAWNRKRISNCVADYSVLYNSASFSTFKCYGVSPTKLNDLCFTNVYADSFVIRGDEVRQIAPGQTGKIADYNYKLPDDFTGCVIAWNSNNLDSKVGGNYNYLYRLFRKSNLKPFERDISTEIYQAGSTPCNGVEGFNCYFPLQSYGFQPTNGVGYQPYRVVVLSFELLHAPATVCGPKKSTNLVKNKCVNFNFNGLTGTGVLTESNKKFLPFQQFGGSGGGGDGGGGSGDKTHTCPPCPAPELLGGPSVFLFPPKPKDTLMISRTPEVTCVVVDVSHEDPEVKFNWYVDGVEVHNAKTKPREEQYNSTYRVVSVLTVLHQDWLNGKEYKCKVSNKALPAPIEKTISKAKGQPREPQVYTLPPSREELTKNQVSLTCLVKGFYPSDIAVEWESNGQPENNYKTTPPVLDSDGSFFLYSKLTVDKSRWQQGNVFSCSVMHEALHNHYTQKSLSLSPGS

SEQ ID NO: 537 - protein, 487 aa, synthetic construct
  REGION 1..487: note = Synthetic
RVQPTESIVRFPNITNLCPFGEVFNATRFASVYAWNRKRISNCVADYSVLYNSASFSTFKCYGVSPTKLNDLCFTNVYADSFVIRGDEVRQIAPGQTGKIADYNYKLPDDFTGCVIAWNSNNLDSKVGGNYNYLYRLFRKSNLKPFERDISTEIYQAGSTPCNGVEGFNCYFPLQSYGFQPTNGVGYQPYRVVVLSFELLHAPATVCGPKKSTNLVKNKCVNFNFNGLTGTGVLTESNKKFLPFQQFGSGGGGDGGGGSGDKTHTCPPCPAPELLGGPSVFLFPPKPKDTLMISRTPEVTCVVVDVSHEDPEVKFNWYVDGVEVHNAKTKPREEQYNSTYRVVSVLTVLHQDWLNGKEYKCKVSNKALPAPIEKTISKAKGQPREPQVYTLPPSREELTKNQVSLTCLVKGFYPSDIAVEWESNGQPENNYKTTPPVLDSDGSFFLYSKLTVDKSRWQQGNVFSCSVMHEALHNHYTQKSLSLSPGS

SEQ ID NO: 538 - protein, 486 aa, synthetic construct
  REGION 1..486: note = Synthetic
RVQPTESIVRFPNITNLCPFGEVFNATRFASVYAWNRKRISNCVADYSVLYNSASFSTFKCYGVSPTKLNDLCFTNVYADSFVIRGDEVRQIAPGQTGKIADYNYKLPDDFTGCVIAWNSNNLDSKVGGNYNYLYRLFRKSNLKPFERDISTEIYQAGSTPCNGVEGFNCYFPLQSYGFQPTNGVGYQPYRVVVLSFELLHAPATVCGPKKSTNLVKNKCVNFNFNGLTGTGVLTESNKKFLPFQQGSGGGGDGGGGSGDKTHTCPPCPAPELLGGPSVFLFPPKPKDTLMISRTPEVTCVVVDVSHEDPEVKFNWYVDGVEVHNAKTKPREEQYNSTYRVVSVLTVLHQDWLNGKEYKCKVSNKALPAPIEKTISKAKGQPREPQVYTLPPSREELTKNQVSLTCLVKGFYPSDIAVEWESNGQPENNYKTTPPVLDSDGSFFLYSKLTVDKSRWQQGNVFSCSVMHEALHNHYTQKSLSLSPGS

SEQ ID NO: 539 - protein, 485 aa, synthetic construct
  REGION 1..485: note = Synthetic
RVQPTESIVRFPNITNLCPFGEVFNATRFASVYAWNRKRISNCVADYSVLYNSASFSTFKCYGVSPTKLNDLCFTNVYADSFVIRGDEVRQIAPGQTGKIADYNYKLPDDFTGCVIAWNSNNLDSKVGGNYNYLYRLFRKSNLKPFERDISTEIYQAGSTPCNGVEGFNCYFPLQSYGFQPTNGVGYQPYRVVVLSFELLHAPATVCGPKKSTNLVKNKCVNFNFNGLTGTGVLTESNKKFLPFQGSGGGGDGGGGSGDKTHTCPPCPAPELLGGPSVFLFPPKPKDTLMISRTPEVTCVVVDVSHEDPEVKFNWYVDGVEVHNAKTKPREEQYNSTYRVVSVLTVLHQDWLNGKEYKCKVSNKALPAPIEKTISKAKGQPREPQVYTLPPSREELTKNQVSLTCLVKGFYPSDIAVEWESNGQPENNYKTTPPVLDSDGSFFLYSKLTVDKSRWQQGNVFSCSVMHEALHNHYTQKSLSLSPGS

SEQ ID NO: 540 - protein, 484 aa, synthetic construct
  REGION 1..484: note = Synthetic
RVQPTESIVRFPNITNLCPFGEVFNATRFASVYAWNRKRISNCVADYSVLYNSASFSTFKCYGVSPTKLNDLCFTNVYADSFVIRGDEVRQIAPGQTGKIADYNYKLPDDFTGCVIAWNSNNLDSKVGGNYNYLYRLFRKSNLKPFERDISTEIYQAGSTPCNGVEGFNCYFPLQSYGFQPTNGVGYQPYRVVVLSFELLHAPATVCGPKKSTNLVKNKCVNFNFNGLTGTGVLTESNKKFLPFGSGGGGDGGGGSGDKTHTCPPCPAPELLGGPSVFLFPPKPKDTLMISRTPEVTCVVVDVSHEDPEVKFNWYVDGVEVHNAKTKPREEQYNSTYRVVSVLTVLHQDWLNGKEYKCKVSNKALPAPIEKTISKAKGQPREPQVYTLPPSREELTKNQVSLTCLVKGFYPSDIAVEWESNGQPENNYKTTPPVLDSDGSFFLYSKLTVDKSRWQQGNVFSCSVMHEALHNHYTQKSLSLSPGS

SEQ ID NO: 541 - protein, 483 aa, synthetic construct
  REGION 1..483: note = Synthetic
RVQPTESIVRFPNITNLCPFGEVFNATRFASVYAWNRKRISNCVADYSVLYNSASFSTFKCYGVSPTKLNDLCFTNVYADSFVIRGDEVRQIAPGQTGKIADYNYKLPDDFTGCVIAWNSNNLDSKVGGNYNYLYRLFRKSNLKPFERDISTEIYQAGSTPCNGVEGFNCYFPLQSYGFQPTNGVGYQPYRVVVLSFELLHAPATVCGPKKSTNLVKNKCVNFNFNGLTGTGVLTESNKKFLPGSGGGGDGGGGSGDKTHTCPPCPAPELLGGPSVFLFPPKPKDTLMISRTPEVTCVVVDVSHEDPEVKFNWYVDGVEVHNAKTKPREEQYNSTYRVVSVLTVLHQDWLNGKEYKCKVSNKALPAPIEKTISKAKGQPREPQVYTLPPSREELTKNQVSLTCLVKGFYPSDIAVEWESNGQPENNYKTTPPVLDSDGSFFLYSKLTVDKSRWQQGNVFSCSVMHEALHNHYTQKSLSLSPGS

SEQ ID NO: 542 - protein, 482 aa, synthetic construct
  REGION 1..482: note = Synthetic
RVQPTESIVRFPNITNLCPFGEVFNATRFASVYAWNRKRISNCVADYSVLYNSASFSTFKCYGVSPTKLNDLCFTNVYADSFVIRGDEVRQIAPGQTGKIADYNYKLPDDFTGCVIAWNSNNLDSKVGGNYNYLYRLFRKSNLKPFERDISTEIYQAGSTPCNGVEGFNCYFPLQSYGFQPTNGVGYQPYRVVVLSFELLHAPATVCGPKKSTNLVKNKCVNFNFNGLTGTGVLTESNKKFLGSGGGGDGGGGSGDKTHTCPPCPAPELLGGPSVFLFPPKPKDTLMISRTPEVTCVVVDVSHEDPEVKFNWYVDGVEVHNAKTKPREEQYNSTYRVVSVLTVLHQDWLNGKEYKCKVSNKALPAPIEKTISKAKGQPREPQVYTLPPSREELTKNQVSLTCLVKGFYPSDIAVEWESNGQPENNYKTTPPVLDSDGSFFLYSKLTVDKSRWQQGNVFSCSVMHEALHNHYTQKSLSLSPGS

SEQ ID NO: 543 - protein, 481 aa, synthetic construct
  REGION 1..481: note = Synthetic
RVQPTESIVRFPNITNLCPFGEVFNATRFASVYAWNRKRISNCVADYSVLYNSASFSTFKCYGVSPTKLNDLCFTNVYADSFVIRGDEVRQIAPGQTGKIADYNYKLPDDFTGCVIAWNSNNLDSKVGGNYNYLYRLFRKSNLKPFERDISTEIYQAGSTPCNGVEGFNCYFPLQSYGFQPTNGVGYQPYRVVVLSFELLHAPATVCGPKKSTNLVKNKCVNFNFNGLTGTGVLTESNKKFGSGGGGDGGGGSGDKTHTCPPCPAPELLGGPSVFLFPPKPKDTLMISRTPEVTCVVVDVSHEDPEVKFNWYVDGVEVHNAKTKPREEQYNSTYRVVSVLTVLHQDWLNGKEYKCKVSNKALPAPIEKTISKAKGQPREPQVYTLPPSREELTKNQVSLTCLVKGFYPSDIAVEWESNGQPENNYKTTPPVLDSDGSFFLYSKLTVDKSRWQQGNVFSCSVMHEALHNHYTQKSLSLSPGS

SEQ ID NO: 544 - protein, 480 aa, synthetic construct
  REGION 1..480: note = Synthetic
RVQPTESIVRFPNITNLCPFGEVFNATRFASVYAWNRKRISNCVADYSVLYNSASFSTFKCYGVSPTKLNDLCFTNVYADSFVIRGDEVRQIAPGQTGKIADYNYKLPDDFTGCVIAWNSNNLDSKVGGNYNYLYRLFRKSNLKPFERDISTEIYQAGSTPCNGVEGFNCYFPLQSYGFQPTNGVGYQPYRVVVLSFELLHAPATVCGPKKSTNLVKNKCVNFNFNGLTGTGVLTESNKKGSGGGGDGGGGSGDKTHTCPPCPAPELLGGPSVFLFPPKPKDTLMISRTPEVTCVVVDVSHEDPEVKFNWYVDGVEVHNAKTKPREEQYNSTYRVVSVLTVLHQDWLNGKEYKCKVSNKALPAPIEKTISKAKGQPREPQVYTLPPSREELTKNQVSLTCLVKGFYPSDIAVEWESNGQPENNYKTTPPVLDSDGSFFLYSKLTVDKSRWQQGNVFSCSVMHEALHNHYTQKSLSLSPGS

SEQ ID NO: 545 - protein, 479 aa, synthetic construct
  REGION 1..479: note = Synthetic
RVQPTESIVRFPNITNLCPFGEVFNATRFASVYAWNRKRISNCVADYSVLYNSASFSTFKCYGVSPTKLNDLCFTNVYADSFVIRGDEVRQIAPGQTGKIADYNYKLPDDFTGCVIAWNSNNLDSKVGGNYNYLYRLFRKSNLKPFERDISTEIYQAGSTPCNGVEGFNCYFPLQSYGFQPTNGVGYQPYRVVVLSFELLHAPATVCGPKKSTNLVKNKCVNFNFNGLTGTGVLTESNKGSGGGGDGGGGSGDKTHTCPPCPAPELLGGPSVFLFPPKPKDTLMISRTPEVTCVVVDVSHEDPEVKFNWYVDGVEVHNAKTKPREEQYNSTYRVVSVLTVLHQDWLNGKEYKCKVSNKALPAPIEKTISKAKGQPREPQVYTLPPSREELTKNQVSLTCLVKGFYPSDIAVEWESNGQPENNYKTTPPVLDSDGSFFLYSKLTVDKSRWQQGNVFSCSVMHEALHNHYTQKSLSLSPGS

SEQ ID NO: 546 - protein, 478 aa, synthetic construct
  REGION 1..478: note = Synthetic
RVQPTESIVRFPNITNLCPFGEVFNATRFASVYAWNRKRISNCVADYSVLYNSASFSTFKCYGVSPTKLNDLCFTNVYADSFVIRGDEVRQIAPGQTGKIADYNYKLPDDFTGCVIAWNSNNLDSKVGGNYNYLYRLFRKSNLKPFERDISTEIYQAGSTPCNGVEGFNCYFPLQSYGFQPTNGVGYQPYRVVVLSFELLHAPATVCGPKKSTNLVKNKCVNFNFNGLTGTGVLTESNGSGGGGDGGGGSGDKTHTCPPCPAPELLGGPSVFLFPPKPKDTLMISRTPEVTCVVVDVSHEDPEVKFNWYVDGVEVHNAKTKPREEQYNSTYRVVSVLTVLHQDWLNGKEYKCKVSNKALPAPIEKTISKAKGQPREPQVYTLPPSREELTKNQVSLTCLVKGFYPSDIAVEWESNGQPENNYKTTPPVLDSDGSFFLYSKLTVDKSRWQQGNVFSCSVMHEALHNHYTQKSLSLSPGS

SEQ ID NO: 547 - protein, 477 aa, synthetic construct; identical to SEQ ID NO: 129
  REGION 1..477: note = Synthetic

SEQ ID NO: 548 - protein, 476 aa, synthetic construct
  REGION 1..476: note = Synthetic
RVQPTESIVRFPNITNLCPFGEVFNATRFASVYAWNRKRISNCVADYSVLYNSASFSTFKCYGVSPTKLNDLCFTNVYADSFVIRGDEVRQIAPGQTGKIADYNYKLPDDFTGCVIAWNSNNLDSKVGGNYNYLYRLFRKSNLKPFERDISTEIYQAGSTPCNGVEGFNCYFPLQSYGFQPTNGVGYQPYRVVVLSFELLHAPATVCGPKKSTNLVKNKCVNFNFNGLTGTGVLTEGSGGGGDGGGGSGDKTHTCPPCPAPELLGGPSVFLFPPKPKDTLMISRTPEVTCVVVDVSHEDPEVKFNWYVDGVEVHNAKTKPREEQYNSTYRVVSVLTVLHQDWLNGKEYKCKVSNKALPAPIEKTISKAKGQPREPQVYTLPPSREELTKNQVSLTCLVKGFYPSDIAVEWESNGQPENNYKTTPPVLDSDGSFFLYSKLTVDKSRWQQGNVFSCSVMHEALHNHYTQKSLSLSPGS

SEQ ID NO: 549 - protein, 475 aa, synthetic construct
  REGION 1..475: note = Synthetic
RVQPTESIVRFPNITNLCPFGEVFNATRFASVYAWNRKRISNCVADYSVLYNSASFSTFKCYGVSPTKLNDLCFTNVYADSFVIRGDEVRQIAPGQTGKIADYNYKLPDDFTGCVIAWNSNNLDSKVGGNYNYLYRLFRKSNLKPFERDISTEIYQAGSTPCNGVEGFNCYFPLQSYGFQPTNGVGYQPYRVVVLSFELLHAPATVCGPKKSTNLVKNKCVNFNFNGLTGTGVLTGSGGGGDGGGGSGDKTHTCPPCPAPELLGGPSVFLFPPKPKDTLMISRTPEVTCVVVDVSHEDPEVKFNWYVDGVEVHNAKTKPREEQYNSTYRVVSVLTVLHQDWLNGKEYKCKVSNKALPAPIEKTISKAKGQPREPQVYTLPPSREELTKNQVSLTCLVKGFYPSDIAVEWESNGQPENNYKTTPPVLDSDGSFFLYSKLTVDKSRWQQGNVFSCSVMHEALHNHYTQKSLSLSPGS

SEQ ID NO: 550 - protein, 474 aa, synthetic construct
  REGION 1..474: note = Synthetic
RVQPTESIVRFPNITNLCPFGEVFNATRFASVYAWNRKRISNCVADYSVLYNSASFSTFKCYGVSPTKLNDLCFTNVYADSFVIRGDEVRQIAPGQTGKIADYNYKLPDDFTGCVIAWNSNNLDSKVGGNYNYLYRLFRKSNLKPFERDISTEIYQAGSTPCNGVEGFNCYFPLQSYGFQPTNGVGYQPYRVVVLSFELLHAPATVCGPKKSTNLVKNKCVNFNFNGLTGTGVLGSGGGGDGGGGSGDKTHTCPPCPAPELLGGPSVFLFPPKPKDTLMISRTPEVTCVVVDVSHEDPEVKFNWYVDGVEVHNAKTKPREEQYNSTYRVVSVLTVLHQDWLNGKEYKCKVSNKALPAPIEKTISKAKGQPREPQVYTLPPSREELTKNQVSLTCLVKGFYPSDIAVEWESNGQPENNYKTTPPVLDSDGSFFLYSKLTVDKSRWQQGNVFSCSVMHEALHNHYTQKSLSLSPGS

SEQ ID NO: 551 - protein, 473 aa, synthetic construct
  REGION 1..473: note = Synthetic
RVQPTESIVRFPNITNLCPFGEVFNATRFASVYAWNRKRISNCVADYSVLYNSASFSTFKCYGVSPTKLNDLCFTNVYADSFVIRGDEVRQIAPGQTGKIADYNYKLPDDFTGCVIAWNSNNLDSKVGGNYNYLYRLFRKSNLKPFERDISTEIYQAGSTPCNGVEGFNCYFPLQSYGFQPTNGVGYQPYRVVVLSFELLHAPATVCGPKKSTNLVKNKCVNFNFNGLTGTGVGSGGGGDGGGGSGDKTHTCPPCPAPELLGGPSVFLFPPKPKDTLMISRTPEVTCVVVDVSHEDPEVKFNWYVDGVEVHNAKTKPREEQYNSTYRVVSVLTVLHQDWLNGKEYKCKVSNKALPAPIEKTISKAKGQPREPQVYTLPPSREELTKNQVSLTCLVKGFYPSDIAVEWESNGQPENNYKTTPPVLDSDGSFFLYSKLTVDKSRWQQGNVFSCSVMHEALHNHYTQKSLSLSPGS

SEQ ID NO: 552 - protein, 472 aa, synthetic construct
  REGION 1..472: note = Synthetic
RVQPTESIVRFPNITNLCPFGEVFNATRFASVYAWNRKRISNCVADYSVLYNSASFSTFKCYGVSPTKLNDLCFTNVYADSFVIRGDEVRQIAPGQTGKIADYNYKLPDDFTGCVIAWNSNNLDSKVGGNYNYLYRLFRKSNLKPFERDISTEIYQAGSTPCNGVEGFNCYFPLQSYGFQPTNGVGYQPYRVVVLSFELLHAPATVCGPKKSTNLVKNKCVNFNFNGLTGTGGSGGGGDGGGGSGDKTHTCPPCPAPELLGGPSVFLFPPKPKDTLMISRTPEVTCVVVDVSHEDPEVKFNWYVDGVEVHNAKTKPREEQYNSTYRVVSVLTVLHQDWLNGKEYKCKVSNKALPAPIEKTISKAKGQPREPQVYTLPPSREELTKNQVSLTCLVKGFYPSDIAVEWESNGQPENNYKTTPPVLDSDGSFFLYSKLTVDKSRWQQGNVFSCSVMHEALHNHYTQKSLSLSPGS

SEQ ID NO: 553 - protein, 471 aa, synthetic construct
  REGION 1..471: note = Synthetic
RVQPTESIVRFPNITNLCPFGEVFNATRFASVYAWNRKRISNCVADYSVLYNSASFSTFKCYGVSPTKLNDLCFTNVYADSFVIRGDEVRQIAPGQTGKIADYNYKLPDDFTGCVIAWNSNNLDSKVGGNYNYLYRLFRKSNLKPFERDISTEIYQAGSTPCNGVEGFNCYFPLQSYGFQPTNGVGYQPYRVVVLSFELLHAPATVCGPKKSTNLVKNKCVNFNFNGLTGTGSGGGGDGGGGSGDKTHTCPPCPAPELLGGPSVFLFPPKPKDTLMISRTPEVTCVVVDVSHEDPEVKFNWYVDGVEVHNAKTKPREEQYNSTYRVVSVLTVLHQDWLNGKEYKCKVSNKALPAPIEKTISKAKGQPREPQVYTLPPSREELTKNQVSLTCLVKGFYPSDIAVEWESNGQPENNYKTTPPVLDSDGSFFLYSKLTVDKSRWQQGNVFSCSVMHEALHNHYTQKSLSLSPGS

SEQ ID NO: 554 - protein, 470 aa, synthetic construct
  REGION 1..470: note = Synthetic
RVQPTESIVRFPNITNLCPFGEVFNATRFASVYAWNRKRISNCVADYSVLYNSASFSTFKCYGVSPTKLNDLCFTNVYADSFVIRGDEVRQIAPGQTGKIADYNYKLPDDFTGCVIAWNSNNLDSKVGGNYNYLYRLFRKSNLKPFERDISTEIYQAGSTPCNGVEGFNCYFPLQSYGFQPTNGVGYQPYRVVVLSFELLHAPATVCGPKKSTNLVKNKCVNFNFNGLTGGSGGGGDGGGGSGDKTHTCPPCPAPELLGGPSVFLFPPKPKDTLMISRTPEVTCVVVDVSHEDPEVKFNWYVDGVEVHNAKTKPREEQYNSTYRVVSVLTVLHQDWLNGKEYKCKVSNKALPAPIEKTISKAKGQPREPQVYTLPPSREELTKNQVSLTCLVKGFYPSDIAVEWESNGQPENNYKTTPPVLDSDGSFFLYSKLTVDKSRWQQGNVFSCSVMHEALHNHYTQKSLSLSPGS

SEQ ID NO: 555 - protein, 469 aa, synthetic construct
  REGION 1..469: note = Synthetic
RVQPTESIVRFPNITNLCPFGEVFNATRFASVYAWNRKRISNCVADYSVLYNSASFSTFKCYGVSPTKLNDLCFTNVYADSFVIRGDEVRQIAPGQTGKIADYNYKLPDDFTGCVIAWNSNNLDSKVGGNYNYLYRLFRKSNLKPFERDISTEIYQAGSTPCNGVEGFNCYFPLQSYGFQPTNGVGYQPYRVVVLSFELLHAPATVCGPKKSTNLVKNKCVNFNFNGLTGSGGGGDGGGGSGDKTHTCPPCPAPELLGGPSVFLFPPKPKDTLMISRTPEVTCVVVDVSHEDPEVKFNWYVDGVEVHNAKTKPREEQYNSTYRVVSVLTVLHQDWLNGKEYKCKVSNKALPAPIEKTISKAKGQPREPQVYTLPPSREELTKNQVSLTCLVKGFYPSDIAVEWESNGQPENNYKTTPPVLDSDGSFFLYSKLTVDKSRWQQGNVFSCSVMHEALHNHYTQKSLSLSPGS

SEQ ID NO: 556 - protein, 468 aa, synthetic construct
  REGION 1..468: note = Synthetic
RVQPTESIVRFPNITNLCPFGEVFNATRFASVYAWNRKRISNCVADYSVLYNSASFSTFKCYGVSPTKLNDLCFTNVYADSFVIRGDEVRQIAPGQTGKIADYNYKLPDDFTGCVIAWNSNNLDSKVGGNYNYLYRLFRKSNLKPFERDISTEIYQAGSTPCNGVEGFNCYFPLQSYGFQPTNGVGYQPYRVVVLSFELLHAPATVCGPKKSTNLVKNKCVNFNFNGLGSGGGGDGGGGSGDKTHTCPPCPAPELLGGPSVFLFPPKPKDTLMISRTPEVTCVVVDVSHEDPEVKFNWYVDGVEVHNAKTKPREEQYNSTYRVVSVLTVLHQDWLNGKEYKCKVSNKALPAPIEKTISKAKGQPREPQVYTLPPSREELTKNQVSLTCLVKGFYPSDIAVEWESNGQPENNYKTTPPVLDSDGSFFLYSKLTVDKSRWQQGNVFSCSVMHEALHNHYTQKSLSLSPGS

SEQ ID NO: 557 - protein, 467 aa, synthetic construct
  REGION 1..467: note = Synthetic
RVQPTESIVRFPNITNLCPFGEVFNATRFASVYAWNRKRISNCVADYSVLYNSASFSTFKCYGVSPTKLNDLCFTNVYADSFVIRGDEVRQIAPGQTGKIADYNYKLPDDFTGCVIAWNSNNLDSKVGGNYNYLYRLFRKSNLKPFERDISTEIYQAGSTPCNGVEGFNCYFPLQSYGFQPTNGVGYQPYRVVVLSFELLHAPATVCGPKKSTNLVKNKCVNFNFNGGSGGGGDGGGGSGDKTHTCPPCPAPELLGGPSVFLFPPKPKDTLMISRTPEVTCVVVDVSHEDPEVKFNWYVDGVEVHNAKTKPREEQYNSTYRVVSVLTVLHQDWLNGKEYKCKVSNKALPAPIEKTISKAKGQPREPQVYTLPPSREELTKNQVSLTCLVKGFYPSDIAVEWESNGQPENNYKTTPPVLDSDGSFFLYSKLTVDKSRWQQGNVFSCSVMHEALHNHYTQKSLSLSPGS

SEQ ID NO: 558 - protein, 466 aa, synthetic construct
  REGION 1..466: note = Synthetic
RVQPTESIVRFPNITNLCPFGEVFNATRFASVYAWNRKRISNCVADYSVLYNSASFSTFKCYGVSPTKLNDLCFTNVYADSFVIRGDEVRQIAPGQTGKIADYNYKLPDDFTGCVIAWNSNNLDSKVGGNYNYLYRLFRKSNLKPFERDISTEIYQAGSTPCNGVEGFNCYFPLQSYGFQPTNGVGYQPYRVVVLSFELLHAPATVCGPKKSTNLVKNKCVNFNFNGSGGGGDGGGGSGDKTHTCPPCPAPELLGGPSVFLFPPKPKDTLMISRTPEVTCVVVDVSHEDPEVKFNWYVDGVEVHNAKTKPREEQYNSTYRVVSVLTVLHQDWLNGKEYKCKVSNKALPAPIEKTISKAKGQPREPQVYTLPPSREELTKNQVSLTCLVKGFYPSDIAVEWESNGQPENNYKTTPPVLDSDGSFFLYSKLTVDKSRWQQGNVFSCSVMHEALHNHYTQKSLSLSPGS

SEQ ID NO: 559 - protein, 465 aa, synthetic construct
  REGION 1..465: note = Synthetic
RVQPTESIVRFPNITNLCPFGEVFNATRFASVYAWNRKRISNCVADYSVLYNSASFSTFKCYGVSPTKLNDLCFTNVYADSFVIRGDEVRQIAPGQTGKIADYNYKLPDDFTGCVIAWNSNNLDSKVGGNYNYLYRLFRKSNLKPFERDISTEIYQAGSTPCNGVEGFNCYFPLQSYGFQPTNGVGYQPYRVVVLSFELLHAPATVCGPKKSTNLVKNKCVNFNFGSGGGGDGGGGSGDKTHTCPPCPAPELLGGPSVFLFPPKPKDTLMISRTPEVTCVVVDVSHEDPEVKFNWYVDGVEVHNAKTKPREEQYNSTYRVVSVLTVLHQDWLNGKEYKCKVSNKALPAPIEKTISKAKGQPREPQVYTLPPSREELTKNQVSLTCLVKGFYPSDIAVEWESNGQPENNYKTTPPVLDSDGSFFLYSKLTVDKSRWQQGNVFSCSVMHEALHNHYTQKSLSLSPGS

SEQ ID NO: 560 - protein, 464 aa, synthetic construct
  REGION 1..464: note = Synthetic
RVQPTESIVRFPNITNLCPFGEVFNATRFASVYAWNRKRISNCVADYSVLYNSASFSTFKCYGVSPTKLNDLCFTNVYADSFVIRGDEVRQIAPGQTGKIADYNYKLPDDFTGCVIAWNSNNLDSKVGGNYNYLYRLFRKSNLKPFERDISTEIYQAGSTPCNGVEGFNCYFPLQSYGFQPTNGVGYQPYRVVVLSFELLHAPATVCGPKKSTNLVKNKCVNFNGSGGGGDGGGGSGDKTHTCPPCPAPELLGGPSVFLFPPKPKDTLMISRTPEVTCVVVDVSHEDPEVKFNWYVDGVEVHNAKTKPREEQYNSTYRVVSVLTVLHQDWLNGKEYKCKVSNKALPAPIEKTISKAKGQPREPQVYTLPPSREELTKNQVSLTCLVKGFYPSDIAVEWESNGQPENNYKTTPPVLDSDGSFFLYSKLTVDKSRWQQGNVFSCSVMHEALHNHYTQKSLSLSPGS

SEQ ID NO: 561 - protein, 463 aa, synthetic construct
  REGION 1..463: note = Synthetic
RVQPTESIVRFPNITNLCPFGEVFNATRFASVYAWNRKRISNCVADYSVLYNSASFSTFKCYGVSPTKLNDLCFTNVYADSFVIRGDEVRQIAPGQTGKIADYNYKLPDDFTGCVIAWNSNNLDSKVGGNYNYLYRLFRKSNLKPFERDISTEIYQAGSTPCNGVEGFNCYFPLQSYGFQPTNGVGYQPYRVVVLSFELLHAPATVCGPKKSTNLVKNKCVNFGSGGGGDGGGGSGDKTHTCPPCPAPELLGGPSVFLFPPKPKDTLMISRTPEVTCVVVDVSHEDPEVKFNWYVDGVEVHNAKTKPREEQYNSTYRVVSVLTVLHQDWLNGKEYKCKVSNKALPAPIEKTISKAKGQPREPQVYTLPPSREELTKNQVSLTCLVKGFYPSDIAVEWESNGQPENNYKTTPPVLDSDGSFFLYSKLTVDKSRWQQGNVFSCSVMHEALHNHYTQKSLSLSPGS

SEQ ID NO: 562 - protein, 462 aa, synthetic construct
  REGION 1..462: note = Synthetic
RVQPTESIVRFPNITNLCPFGEVFNATRFASVYAWNRKRISNCVADYSVLYNSASFSTFKCYGVSPTKLNDLCFTNVYADSFVIRGDEVRQIAPGQTGKIADYNYKLPDDFTGCVIAWNSNNLDSKVGGNYNYLYRLFRKSNLKPFERDISTEIYQAGSTPCNGVEGFNCYFPLQSYGFQPTNGVGYQPYRVVVLSFELLHAPATVCGPKKSTNLVKNKCVNGSGGGGDGGGGSGDKTHTCPPCPAPELLGGPSVFLFPPKPKDTLMISRTPEVTCVVVDVSHEDPEVKFNWYVDGVEVHNAKTKPREEQYNSTYRVVSVLTVLHQDWLNGKEYKCKVSNKALPAPIEKTISKAKGQPREPQVYTLPPSREELTKNQVSLTCLVKGFYPSDIAVEWESNGQPENNYKTTPPVLDSDGSFFLYSKLTVDKSRWQQGNVFSCSVMHEALHNHYTQKSLSLSPGS

SEQ ID NO: 563 - protein, 461 aa, synthetic construct
  REGION 1..461: note = Synthetic
RVQPTESIVRFPNITNLCPFGEVFNATRFASVYAWNRKRISNCVADYSVLYNSASFSTFKCYGVSPTKLNDLCFTNVYADSFVIRGDEVRQIAPGQTGKIADYNYKLPDDFTGCVIAWNSNNLDSKVGGNYNYLYRLFRKSNLKPFERDISTEIYQAGSTPCNGVEGFNCYFPLQSYGFQPTNGVGYQPYRVVVLSFELLHAPATVCGPKKSTNLVKNKCVGSGGGGDGGGGSGDKTHTCPPCPAPELLGGPSVFLFPPKPKDTLMISRTPEVTCVVVDVSHEDPEVKFNWYVDGVEVHNAKTKPREEQYNSTYRVVSVLTVLHQDWLNGKEYKCKVSNKALPAPIEKTISKAKGQPREPQVYTLPPSREELTKNQVSLTCLVKGFYPSDIAVEWESNGQPENNYKTTPPVLDSDGSFFLYSKLTVDKSRWQQGNVFSCSVMHEALHNHYTQKSLSLSPGS

SEQ ID NO: 564 - protein, 460 aa, synthetic construct
  REGION 1..460: note = Synthetic
RVQPTESIVRFPNITNLCPFGEVFNATRFASVYAWNRKRISNCVADYSVLYNSASFSTFKCYGVSPTKLNDLCFTNVYADSFVIRGDEVRQIAPGQTGKIADYNYKLPDDFTGCVIAWNSNNLDSKVGGNYNYLYRLFRKSNLKPFERDISTEIYQAGSTPCNGVEGFNCYFPLQSYGFQPTNGVGYQPYRVVVLSFELLHAPATVCGPKKSTNLVKNKCGSGGGGDGGGGSGDKTHTCPPCPAPELLGGPSVFLFPPKPKDTLMISRTPEVTCVVVDVSHEDPEVKFNWYVDGVEVHNAKTKPREEQYNSTYRVVSVLTVLHQDWLNGKEYKCKVSNKALPAPIEKTISKAKGQPREPQVYTLPPSREELTKNQVSLTCLVKGFYPSDIAVEWESNGQPENNYKTTPPVLDSDGSFFLYSKLTVDKSRWQQGNVFSCSVMHEALHNHYTQKSLSLSPGS

SEQ ID NO: 565 - protein, 459 aa, synthetic construct
  REGION 1..459: note = Synthetic
RVQPTESIVRFPNITNLCPFGEVFNATRFASVYAWNRKRISNCVADYSVLYNSASFSTFKCYGVSPTKLNDLCFTNVYADSFVIRGDEVRQIAPGQTGKIADYNYKLPDDFTGCVIAWNSNNLDSKVGGNYNYLYRLFRKSNLKPFERDISTEIYQAGSTPCNGVEGFNCYFPLQSYGFQPTNGVGYQPYRVVVLSFELLHAPATVCGPKKSTNLVKNKGSGGGGDGGGGSGDKTHTCPPCPAPELLGGPSVFLFPPKPKDTLMISRTPEVTCVVVDVSHEDPEVKFNWYVDGVEVHNAKTKPREEQYNSTYRVVSVLTVLHQDWLNGKEYKCKVSNKALPAPIEKTISKAKGQPREPQVYTLPPSREELTKNQVSLTCLVKGFYPSDIAVEWESNGQPENNYKTTPPVLDSDGSFFLYSKLTVDKSRWQQGNVFSCSVMHEALHNHYTQKSLSLSPGS

SEQ ID NO: 566 - protein, 458 aa, synthetic construct
  REGION 1..458: note = Synthetic
RVQPTESIVRFPNITNLCPFGEVFNATRFASVYAWNRKRISNCVADYSVLYNSASFSTFKCYGVSPTKLNDLCFTNVYADSFVIRGDEVRQIAPGQTGKIADYNYKLPDDFTGCVIAWNSNNLDSKVGGNYNYLYRLFRKSNLKPFERDISTEIYQAGSTPCNGVEGFNCYFPLQSYGFQPTNGVGYQPYRVVVLSFELLHAPATVCGPKKSTNLVKNGSGGGGDGGGGSGDKTHTCPPCPAPELLGGPSVFLFPPKPKDTLMISRTPEVTCVVVDVSHEDPEVKFNWYVDGVEVHNAKTKPREEQYNSTYRVVSVLTVLHQDWLNGKEYKCKVSNKALPAPIEKTISKAKGQPREPQVYTLPPSREELTKNQVSLTCLVKGFYPSDIAVEWESNGQPENNYKTTPPVLDSDGSFFLYSKLTVDKSRWQQGNVFSCSVMHEALHNHYTQKSLSLSPGS

SEQ ID NO: 567 - protein, 457 aa, synthetic construct
  REGION 1..457: note = Synthetic
RVQPTESIVRFPNITNLCPFGEVFNATRFASVYAWNRKRISNCVADYSVLYNSASFSTFKCYGVSPTKLNDLCFTNVYADSFVIRGDEVRQIAPGQTGKIADYNYKLPDDFTGCVIAWNSNNLDSKVGGNYNYLYRLFRKSNLKPFERDISTEIYQAGSTPCNGVEGFNCYFPLQSYGFQPTNGVGYQPYRVVVLSFELLHAPATVCGPKKSTNLVKGSGGGGDGGGGSGDKTHTCPPCPAPELLGGPSVFLFPPKPKDTLMISRTPEVTCVVVDVSHEDPEVKFNWYVDGVEVHNAKTKPREEQYNSTYRVVSVLTVLHQDWLNGKEYKCKVSNKALPAPIEKTISKAKGQPREPQVYTLPPSREELTKNQVSLTCLVKGFYPSDIAVEWESNGQPENNYKTTPPVLDSDGSFFLYSKLTVDKSRWQQGNVFSCSVMHEALHNHYTQKSLSLSPGS

SEQ ID NO: 568 - protein, 456 aa, synthetic construct
  REGION 1..456: note = Synthetic
RVQPTESIVRFPNITNLCPFGEVFNATRFASVYAWNRKRISNCVADYSVLYNSASFSTFKCYGVSPTKLNDLCFTNVYADSFVIRGDEVRQIAPGQTGKIADYNYKLPDDFTGCVIAWNSNNLDSKVGGNYNYLYRLFRKSNLKPFERDISTEIYQAGSTPCNGVEGFNCYFPLQSYGFQPTNGVGYQPYRVVVLSFELLHAPATVCGPKKSTNLVGSGGGGDGGGGSGDKTHTCPPCPAPELLGGPSVFLFPPKPKDTLMISRTPEVTCVVVDVSHEDPEVKFNWYVDGVEVHNAKTKPREEQYNSTYRVVSVLTVLHQDWLNGKEYKCKVSNKALPAPIEKTISKAKGQPREPQVYTLPPSREELTKNQVSLTCLVKGFYPSDIAVEWESNGQPENNYKTTPPVLDSDGSFFLYSKLTVDKSRWQQGNVFSCSVMHEALHNHYTQKSLSLSPGS

SEQ ID NO: 569 - protein, 455 aa, synthetic construct
  REGION 1..455: note = Synthetic
RVQPTESIVRFPNITNLCPFGEVFNATRFASVYAWNRKRISNCVADYSVLYNSASFSTFKCYGVSPTKLNDLCFTNVYADSFVIRGDEVRQIAPGQTGKIADYNYKLPDDFTGCVIAWNSNNLDSKVGGNYNYLYRLFRKSNLKPFERDISTEIYQAGSTPCNGVEGFNCYFPLQSYGFQPTNGVGYQPYRVVVLSFELLHAPATVCGPKKSTNLGSGGGGDGGGGSGDKTHTCPPCPAPELLGGPSVFLFPPKPKDTLMISRTPEVTCVVVDVSHEDPEVKFNWYVDGVEVHNAKTKPREEQYNSTYRVVSVLTVLHQDWLNGKEYKCKVSNKALPAPIEKTISKAKGQPREPQVYTLPPSREELTKNQVSLTCLVKGFYPSDIAVEWESNGQPENNYKTTPPVLDSDGSFFLYSKLTVDKSRWQQGNVFSCSVMHEALHNHYTQKSLSLSPGS

SEQ ID NO: 570 - protein, 454 aa, synthetic construct
  REGION 1..454: note = Synthetic
RVQPTESIVRFPNITNLCPFGEVFNATRFASVYAWNRKRISNCVADYSVLYNSASFSTFKCYGVSPTKLNDLCFTNVYADSFVIRGDEVRQIAPGQTGKIADYNYKLPDDFTGCVIAWNSNNLDSKVGGNYNYLYRLFRKSNLKPFERDISTEIYQAGSTPCNGVEGFNCYFPLQSYGFQPTNGVGYQPYRVVVLSFELLHAPATVCGPKKSTNGSGGGGDGGGGSGDKTHTCPPCPAPELLGGPSVFLFPPKPKDTLMISRTPEVTCVVVDVSHEDPEVKFNWYVDGVEVHNAKTKPREEQYNSTYRVVSVLTVLHQDWLNGKEYKCKVSNKALPAPIEKTISKAKGQPREPQVYTLPPSREELTKNQVSLTCLVKGFYPSDIAVEWESNGQPENNYKTTPPVLDSDGSFFLYSKLTVDKSRWQQGNVFSCSVMHEALHNHYTQKSLSLSPGS

SEQ ID NO: 571 - protein, 453 aa, synthetic construct
  REGION 1..453: note = Synthetic
RVQPTESIVRFPNITNLCPFGEVFNATRFASVYAWNRKRISNCVADYSVLYNSASFSTFKCYGVSPTKLNDLCFTNVYADSFVIRGDEVRQIAPGQTGKIADYNYKLPDDFTGCVIAWNSNNLDSKVGGNYNYLYRLFRKSNLKPFERDISTEIYQAGSTPCNGVEGFNCYFPLQSYGFQPTNGVGYQPYRVVVLSFELLHAPATVCGPKKSTGSGGGGDGGGGSGDKTHTCPPCPAPELLGGPSVFLFPPKPKDTLMISRTPEVTCVVVDVSHEDPEVKFNWYVDGVEVHNAKTKPREEQYNSTYRVVSVLTVLHQDWLNGKEYKCKVSNKALPAPIEKTISKAKGQPREPQVYTLPPSREELTKNQVSLTCLVKGFYPSDIAVEWESNGQPENNYKTTPPVLDSDGSFFLYSKLTVDKSRWQQGNVFSCSVMHEALHNHYTQKSLSLSPGS

SEQ ID NO: 572 - protein, 452 aa, synthetic construct
  REGION 1..452: note = Synthetic
RVQPTESIVRFPNITNLCPFGEVFNATRFASVYAWNRKRISNCVADYSVLYNSASFSTFKCYGVSPTKLNDLCFTNVYADSFVIRGDEVRQIAPGQTGKIADYNYKLPDDFTGCVIAWNSNNLDSKVGGNYNYLYRLFRKSNLKPFERDISTEIYQAGSTPCNGVEGFNCYFPLQSYGFQPTNGVGYQPYRVVVLSFELLHAPATVCGPKKSGSGGGGDGGGGSGDKTHTCPPCPAPELLGGPSVFLFPPKPKDTLMISRTPEVTCVVVDVSHEDPEVKFNWYVDGVEVHNAKTKPREEQYNSTYRVVSVLTVLHQDWLNGKEYKCKVSNKALPAPIEKTISKAKGQPREPQVYTLPPSREELTKNQVSLTCLVKGFYPSDIAVEWESNGQPENNYKTTPPVLDSDGSFFLYSKLTVDKSRWQQGNVFSCSVMHEALHNHYTQKSLSLSPGS

SEQ ID NO: 573 - protein, 489 aa, synthetic construct
  REGION 1..489: note = Synthetic
VQPTESIVRFPNITNLCPFGEVFNATRFASVYAWNRKRISNCVADYSVLYNSASFSTFKCYGVSPTKLNDLCFTNVYADSFVIRGDEVRQIAPGQTGKIADYNYKLPDDFTGCVIAWNSNNLDSKVGGNYNYLYRLFRKSNLKPFERDISTEIYQAGSTPCNGVEGFNCYFPLQSYGFQPTNGVGYQPYRVVVLSFELLHAPATVCGPKKSTNLVKNKCVNFNFNGLTGTGVLTESNKKFLPFQQFGRDGSGGGGDGGGGSGDKTHTCPPCPAPELLGGPSVFLFPPKPKDTLMISRTPEVTCVVVDVSHEDPEVKFNWYVDGVEVHNAKTKPREEQYNSTYRVVSVLTVLHQDWLNGKEYKCKVSNKALPAPIEKTISKAKGQPREPQVYTLPPSREELTKNQVSLTCLVKGFYPSDIAVEWESNGQPENNYKTTPPVLDSDGSFFLYSKLTVDKSRWQQGNVFSCSVMHEALHNHYTQKSLSLSPGS

SEQ ID NO: 574 - protein, 488 aa, synthetic construct
  REGION 1..488: note = Synthetic
QPTESIVRFPNITNLCPFGEVFNATRFASVYAWNRKRISNCVADYSVLYNSASFSTFKCYGVSPTKLNDLCFTNVYADSFVIRGDEVRQIAPGQTGKIADYNYKLPDDFTGCVIAWNSNNLDSKVGGNYNYLYRLFRKSNLKPFERDISTEIYQAGSTPCNGVEGFNCYFPLQSYGFQPTNGVGYQPYRVVVLSFELLHAPATVCGPKKSTNLVKNKCVNFNFNGLTGTGVLTESNKKFLPFQQFGRDGSGGGGDGGGGSGDKTHTCPPCPAPELLGGPSVFLFPPKPKDTLMISRTPEVTCVVVDVSHEDPEVKFNWYVDGVEVHNAKTKPREEQYNSTYRVVSVLTVLHQDWLNGKEYKCKVSNKALPAPIEKTISKAKGQPREPQVYTLPPSREELTKNQVSLTCLVKGFYPSDIAVEWESNGQPENNYKTTPPVLDSDGSFFLYSKLTVDKSRWQQGNVFSCSVMHEALHNHYTQKSLSLSPGS

SEQ ID NO: 575 - protein, 487 aa, synthetic construct
  REGION 1..487: note = Synthetic
PTESIVRFPNITNLCPFGEVFNATRFASVYAWNRKRISNCVADYSVLYNSASFSTFKCYGVSPTKLNDLCFTNVYADSFVIRGDEVRQIAPGQTGKIADYNYKLPDDFTGCVIAWNSNNLDSKVGGNYNYLYRLFRKSNLKPFERDISTEIYQAGSTPCNGVEGFNCYFPLQSYGFQPTNGVGYQPYRVVVLSFELLHAPATVCGPKKSTNLVKNKCVNFNFNGLTGTGVLTESNKKFLPFQQFGRDGSGGGGDGGGGSGDKTHTCPPCPAPELLGGPSVFLFPPKPKDTLMISRTPEVTCVVVDVSHEDPEVKFNWYVDGVEVHNAKTKPREEQYNSTYRVVSVLTVLHQDWLNGKEYKCKVSNKALPAPIEKTISKAKGQPREPQVYTLPPSREELTKNQVSLTCLVKGFYPSDIAVEWESNGQPENNYKTTPPVLDSDGSFFLYSKLTVDKSRWQQGNVFSCSVMHEALHNHYTQKSLSLSPGS

SEQ ID NO: 576 - protein, 486 aa, synthetic construct
  REGION 1..486: note = Synthetic
TESIVRFPNITNLCPFGEVFNATRFASVYAWNRKRISNCVADYSVLYNSASFSTFKCYGVSPTKLNDLCFTNVYADSFVIRGDEVRQIAPGQTGKIADYNYKLPDDFTGCVIAWNSNNLDSKVGGNYNYLYRLFRKSNLKPFERDISTEIYQAGSTPCNGVEGFNCYFPLQSYGFQPTNGVGYQPYRVVVLSFELLHAPATVCGPKKSTNLVKNKCVNFNFNGLTGTGVLTESNKKFLPFQQFGRDGSGGGGDGGGGSGDKTHTCPPCPAPELLGGPSVFLFPPKPKDTLMISRTPEVTCVVVDVSHEDPEVKFNWYVDGVEVHNAKTKPREEQYNSTYRVVSVLTVLHQDWLNGKEYKCKVSNKALPAPIEKTISKAKGQPREPQVYTLPPSREELTKNQVSLTCLVKGFYPSDIAVEWESNGQPENNYKTTPPVLDSDGSFFLYSKLTVDKSRWQQGNVFSCSVMHEALHNHYTQKSLSLSPGS

SEQ ID NO: 577 - protein, 485 aa, synthetic construct
  REGION 1..485: note = Synthetic
ESIVRFPNITNLCPFGEVFNATRFASVYAWNRKRISNCVADYSVLYNSASFSTFKCYGVSPTKLNDLCFTNVYADSFVIRGDEVRQIAPGQTGKIADYNYKLPDDFTGCVIAWNSNNLDSKVGGNYNYLYRLFRKSNLKPFERDISTEIYQAGSTPCNGVEGFNCYFPLQSYGFQPTNGVGYQPYRVVVLSFELLHAPATVCGPKKSTNLVKNKCVNFNFNGLTGTGVLTESNKKFLPFQQFGRDGSGGGGDGGGGSGDKTHTCPPCPAPELLGGPSVFLFPPKPKDTLMISRTPEVTCVVVDVSHEDPEVKFNWYVDGVEVHNAKTKPREEQYNSTYRVVSVLTVLHQDWLNGKEYKCKVSNKALPAPIEKTISKAKGQPREPQVYTLPPSREELTKNQVSLTCLVKGFYPSDIAVEWESNGQPENNYKTTPPVLDSDGSFFLYSKLTVDKSRWQQGNVFSCSVMHEALHNHYTQKSLSLSPGS

SEQ ID NO: 578 - protein, 484 aa, synthetic construct
  REGION 1..484: note = Synthetic
SIVRFPNITNLCPFGEVFNATRFASVYAWNRKRISNCVADYSVLYNSASFSTFKCYGVSPTKLNDLCFTNVYADSFVIRGDEVRQIAPGQTGKIADYNYKLPDDFTGCVIAWNSNNLDSKVGGNYNYLYRLFRKSNLKPFERDISTEIYQAGSTPCNGVEGFNCYFPLQSYGFQPTNGVGYQPYRVVVLSFELLHAPATVCGPKKSTNLVKNKCVNFNFNGLTGTGVLTESNKKFLPFQQFGRDGSGGGGDGGGGSGDKTHTCPPCPAPELLGGPSVFLFPPKPKDTLMISRTPEVTCVVVDVSHEDPEVKFNWYVDGVEVHNAKTKPREEQYNSTYRVVSVLTVLHQDWLNGKEYKCKVSNKALPAPIEKTISKAKGQPREPQVYTLPPSREELTKNQVSLTCLVKGFYPSDIAVEWESNGQPENNYKTTPPVLDSDGSFFLYSKLTVDKSRWQQGNVFSCSVMHEALHNHYTQKSLSLSPGS

SEQ ID NO: 579 - protein, 483 aa, synthetic construct
  REGION 1..483: note = Synthetic
IVRFPNITNLCPFGEVFNATRFASVYAWNRKRISNCVADYSVLYNSASFSTFKCYGVSPTKLNDLCFTNVYADSFVIRGDEVRQIAPGQTGKIADYNYKLPDDFTGCVIAWNSNNLDSKVGGNYNYLYRLFRKSNLKPFERDISTEIYQAGSTPCNGVEGFNCYFPLQSYGFQPTNGVGYQPYRVVVLSFELLHAPATVCGPKKSTNLVKNKCVNFNFNGLTGTGVLTESNKKFLPFQQFGRDGSGGGGDGGGGSGDKTHTCPPCPAPELLGGPSVFLFPPKPKDTLMISRTPEVTCVVVDVSHEDPEVKFNWYVDGVEVHNAKTKPREEQYNSTYRVVSVLTVLHQDWLNGKEYKCKVSNKALPAPIEKTISKAKGQPREPQVYTLPPSREELTKNQVSLTCLVKGFYPSDIAVEWESNGQPENNYKTTPPVLDSDGSFFLYSKLTVDKSRWQQGNVFSCSVMHEALHNHYTQKSLSLSPGS

SEQ ID NO: 580 - protein, 482 aa, synthetic construct
  REGION 1..482: note = Synthetic
VRFPNITNLCPFGEVFNATRFASVYAWNRKRISNCVADYSVLYNSASFSTFKCYGVSPTKLNDLCFTNVYADSFVIRGDEVRQIAPGQTGKIADYNYKLPDDFTGCVIAWNSNNLDSKVGGNYNYLYRLFRKSNLKPFERDISTEIYQAGSTPCNGVEGFNCYFPLQSYGFQPTNGVGYQPYRVVVLSFELLHAPATVCGPKKSTNLVKNKCVNFNFNGLTGTGVLTESNKKFLPFQQFGRDGSGGGGDGGGGSGDKTHTCPPCPAPELLGGPSVFLFPPKPKDTLMISRTPEVTCVVVDVSHEDPEVKFNWYVDGVEVHNAKTKPREEQYNSTYRVVSVLTVLHQDWLNGKEYKCKVSNKALPAPIEKTISKAKGQPREPQVYTLPPSREELTKNQVSLTCLVKGFYPSDIAVEWESNGQPENNYKTTPPVLDSDGSFFLYSKLTVDKSRWQQGNVFSCSVMHEALHNHYTQKSLSLSPGS

SEQ ID NO: 581 - protein, 481 aa, synthetic construct
  REGION 1..481: note = Synthetic
RFPNITNLCPFGEVFNATRFASVYAWNRKRISNCVADYSVLYNSASFSTFKCYGVSPTKLNDLCFTNVYADSFVIRGDEVRQIAPGQTGKIADYNYKLPDDFTGCVIAWNSNNLDSKVGGNYNYLYRLFRKSNLKPFERDISTEIYQAGSTPCNGVEGFNCYFPLQSYGFQPTNGVGYQPYRVVVLSFELLHAPATVCGPKKSTNLVKNKCVNFNFNGLTGTGVLTESNKKFLPFQQFGRDGSGGGGDGGGGSGDKTHTCPPCPAPELLGGPSVFLFPPKPKDTLMISRTPEVTCVVVDVSHEDPEVKFNWYVDGVEVHNAKTKPREEQYNSTYRVVSVLTVLHQDWLNGKEYKCKVSNKALPAPIEKTISKAKGQPREPQVYTLPPSREELTKNQVSLTCLVKGFYPSDIAVEWESNGQPENNYKTTPPVLDSDGSFFLYSKLTVDKSRWQQGNVFSCSVMHEALHNHYTQKSLSLSPGS

SEQ ID NO: 582 - protein, 480 aa, synthetic construct
  REGION 1..480: note = Synthetic
FPNITNLCPFGEVFNATRFASVYAWNRKRISNCVADYSVLYNSASFSTFKCYGVSPTKLNDLCFTNVYADSFVIRGDEVRQIAPGQTGKIADYNYKLPDDFTGCVIAWNSNNLDSKVGGNYNYLYRLFRKSNLKPFERDISTEIYQAGSTPCNGVEGFNCYFPLQSYGFQPTNGVGYQPYRVVVLSFELLHAPATVCGPKKSTNLVKNKCVNFNFNGLTGTGVLTESNKKFLPFQQFGRDGSGGGGDGGGGSGDKTHTCPPCPAPELLGGPSVFLFPPKPKDTLMISRTPEVTCVVVDVSHEDPEVKFNWYVDGVEVHNAKTKPREEQYNSTYRVVSVLTVLHQDWLNGKEYKCKVSNKALPAPIEKTISKAKGQPREPQVYTLPPSREELTKNQVSLTCLVKGFYPSDIAVEWESNGQPENNYKTTPPVLDSDGSFFLYSKLTVDKSRWQQGNVFSCSVMHEALHNHYTQKSLSLSPGS

SEQ ID NO: 583 - protein, 479 aa, synthetic construct
  REGION 1..479: note = Synthetic
PNITNLCPFGEVFNATRFASVYAWNRKRISNCVADYSVLYNSASFSTFKCYGVSPTKLNDLCFTNVYADSFVIRGDEVRQIAPGQTGKIADYNYKLPDDFTGCVIAWNSNNLDSKVGGNYNYLYRLFRKSNLKPFERDISTEIYQAGSTPCNGVEGFNCYFPLQSYGFQPTNGVGYQPYRVVVLSFELLHAPATVCGPKKSTNLVKNKCVNFNFNGLTGTGVLTESNKKFLPFQQFGRDGSGGGGDGGGGSGDKTHTCPPCPAPELLGGPSVFLFPPKPKDTLMISRTPEVTCVVVDVSHEDPEVKFNWYVDGVEVHNAKTKPREEQYNSTYRVVSVLTVLHQDWLNGKEYKCKVSNKALPAPIEKTISKAKGQPREPQVYTLPPSREELTKNQVSLTCLVKGFYPSDIAVEWESNGQPENNYKTTPPVLDSDGSFFLYSKLTVDKSRWQQGNVFSCSVMHEALHNHYTQKSLSLSPGS

SEQ ID NO: 584 - protein, 478 aa, synthetic construct; identical to SEQ ID NO: 121
  REGION 1..478: note = Synthetic

SEQ ID NO: 585 - protein, 477 aa, synthetic construct
  REGION 1..477: note = Synthetic
ITNLCPFGEVFNATRFASVYAWNRKRISNCVADYSVLYNSASFSTFKCYGVSPTKLNDLCFTNVYADSFVIRGDEVRQIAPGQTGKIADYNYKLPDDFTGCVIAWNSNNLDSKVGGNYNYLYRLFRKSNLKPFERDISTEIYQAGSTPCNGVEGFNCYFPLQSYGFQPTNGVGYQPYRVVVLSFELLHAPATVCGPKKSTNLVKNKCVNFNFNGLTGTGVLTESNKKFLPFQQFGRDGSGGGGDGGGGSGDKTHTCPPCPAPELLGGPSVFLFPPKPKDTLMISRTPEVTCVVVDVSHEDPEVKFNWYVDGVEVHNAKTKPREEQYNSTYRVVSVLTVLHQDWLNGKEYKCKVSNKALPAPIEKTISKAKGQPREPQVYTLPPSREELTKNQVSLTCLVKGFYPSDIAVEWESNGQPENNYKTTPPVLDSDGSFFLYSKLTVDKSRWQQGNVFSCSVMHEALHNHYTQKSLSLSPGS

SEQ ID NO: 586 - protein, 476 aa, synthetic construct
  REGION 1..476: note = Synthetic
TNLCPFGEVFNATRFASVYAWNRKRISNCVADYSVLYNSASFSTFKCYGVSPTKLNDLCFTNVYADSFVIRGDEVRQIAPGQTGKIADYNYKLPDDFTGCVIAWNSNNLDSKVGGNYNYLYRLFRKSNLKPFERDISTEIYQAGSTPCNGVEGFNCYFPLQSYGFQPTNGVGYQPYRVVVLSFELLHAPATVCGPKKSTNLVKNKCVNFNFNGLTGTGVLTESNKKFLPFQQFGRDGSGGGGDGGGGSGDKTHTCPPCPAPELLGGPSVFLFPPKPKDTLMISRTPEVTCVVVDVSHEDPEVKFNWYVDGVEVHNAKTKPREEQYNSTYRVVSVLTVLHQDWLNGKEYKCKVSNKALPAPIEKTISKAKGQPREPQVYTLPPSREELTKNQVSLTCLVKGFYPSDIAVEWESNGQPENNYKTTPPVLDSDGSFFLYSKLTVDKSRWQQGNVFSCSVMHEALHNHYTQKSLSLSPGS

SEQ ID NO: 587 - protein, 475 aa, synthetic construct
  REGION 1..475: note = Synthetic
NLCPFGEVFNATRFASVYAWNRKRISNCVADYSVLYNSASFSTFKCYGVSPTKLNDLCFTNVYADSFVIRGDEVRQIAPGQTGKIADYNYKLPDDFTGCVIAWNSNNLDSKVGGNYNYLYRLFRKSNLKPFERDISTEIYQAGSTPCNGVEGFNCYFPLQSYGFQPTNGVGYQPYRVVVLSFELLHAPATVCGPKKSTNLVKNKCVNFNFNGLTGTGVLTESNKKFLPFQQFGRDGSGGGGDGGGGSGDKTHTCPPCPAPELLGGPSVFLFPPKPKDTLMISRTPEVTCVVVDVSHEDPEVKFNWYVDGVEVHNAKTKPREEQYNSTYRVVSVLTVLHQDWLNGKEYKCKVSNKALPAPIEKTISKAKGQPREPQVYTLPPSREELTKNQVSLTCLVKGFYPSDIAVEWESNGQPENNYKTTPPVLDSDGSFFLYSKLTVDKSRWQQGNVFSCSVMHEALHNHYTQKSLSLSPGS

SEQ ID NO: 588 - protein, 474 aa, synthetic construct
  REGION 1..474: note = Synthetic
LCPFGEVFNATRFASVYAWNRKRISNCVADYSVLYNSASFSTFKCYGVSPTKLNDLCFTNVYADSFVIRGDEVRQIAPGQTGKIADYNYKLPDDFTGCVIAWNSNNLDSKVGGNYNYLYRLFRKSNLKPFERDISTEIYQAGSTPCNGVEGFNCYFPLQSYGFQPTNGVGYQPYRVVVLSFELLHAPATVCGPKKSTNLVKNKCVNFNFNGLTGTGVLTESNKKFLPFQQFGRDGSGGGGDGGGGSGDKTHTCPPCPAPELLGGPSVFLFPPKPKDTLMISRTPEVTCVVVDVSHEDPEVKFNWYVDGVEVHNAKTKPREEQYNSTYRVVSVLTVLHQDWLNGKEYKCKVSNKALPAPIEKTISKAKGQPREPQVYTLPPSREELTKNQVSLTCLVKGFYPSDIAVEWESNGQPENNYKTTPPVLDSDGSFFLYSKLTVDKSRWQQGNVFSCSVMHEALHNHYTQKSLSLSPGS

SEQ ID NO: 589 - protein, 473 aa, synthetic construct
  REGION 1..473: note = Synthetic
CPFGEVFNATRFASVYAWNRKRISNCVADYSVLYNSASFSTFKCYGVSPTKLNDLCFTNVYADSFVIRGDEVRQIAPGQTGKIADYNYKLPDDFTGCVIAWNSNNLDSKVGGNYNYLYRLFRKSNLKPFERDISTEIYQAGSTPCNGVEGFNCYFPLQSYGFQPTNGVGYQPYRVVVLSFELLHAPATVCGPKKSTNLVKNKCVNFNFNGLTGTGVLTESNKKFLPFQQFGRDGSGGGGDGGGGSGDKTHTCPPCPAPELLGGPSVFLFPPKPKDTLMISRTPEVTCVVVDVSHEDPEVKFNWYVDGVEVHNAKTKPREEQYNSTYRVVSVLTVLHQDWLNGKEYKCKVSNKALPAPIEKTISKAKGQPREPQVYTLPPSREELTKNQVSLTCLVKGFYPSDIAVEWESNGQPENNYKTTPPVLDSDGSFFLYSKLTVDKSRWQQGNVFSCSVMHEALHNHYTQKSLSLSPGS

SEQ ID NO: 590 - protein, 472 aa, synthetic construct
  REGION 1..472: note = Synthetic
PFGEVFNATRFASVYAWNRKRISNCVADYSVLYNSASFSTFKCYGVSPTKLNDLCFTNVYADSFVIRGDEVRQIAPGQTGKIADYNYKLPDDFTGCVIAWNSNNLDSKVGGNYNYLYRLFRKSNLKPFERDISTEIYQAGSTPCNGVEGFNCYFPLQSYGFQPTNGVGYQPYRVVVLSFELLHAPATVCGPKKSTNLVKNKCVNFNFNGLTGTGVLTESNKKFLPFQQFGRDGSGGGGDGGGGSGDKTHTCPPCPAPELLGGPSVFLFPPKPKDTLMISRTPEVTCVVVDVSHEDPEVKFNWYVDGVEVHNAKTKPREEQYNSTYRVVSVLTVLHQDWLNGKEYKCKVSNKALPAPIEKTISKAKGQPREPQVYTLPPSREELTKNQVSLTCLVKGFYPSDIAVEWESNGQPENNYKTTPPVLDSDGSFFLYSKLTVDKSRWQQGNVFSCSVMHEALHNHYTQKSLSLSPGS

SEQ ID NO: 591 - protein, 471 aa, synthetic construct
  REGION 1..471: note = Synthetic
FGEVFNATRFASVYAWNRKRISNCVADYSVLYNSASFSTFKCYGVSPTKLNDLCFTNVYADSFVIRGDEVRQIAPGQTGKIADYNYKLPDDFTGCVIAWNSNNLDSKVGGNYNYLYRLFRKSNLKPFERDISTEIYQAGSTPCNGVEGFNCYFPLQSYGFQPTNGVGYQPYRVVVLSFELLHAPATVCGPKKSTNLVKNKCVNFNFNGLTGTGVLTESNKKFLPFQQFGRDGSGGGGDGGGGSGDKTHTCPPCPAPELLGGPSVFLFPPKPKDTLMISRTPEVTCVVVDVSHEDPEVKFNWYVDGVEVHNAKTKPREEQYNSTYRVVSVLTVLHQDWLNGKEYKCKVSNKALPAPIEKTISKAKGQPREPQVYTLPPSREELTKNQVSLTCLVKGFYPSDIAVEWESNGQPENNYKTTPPVLDSDGSFFLYSKLTVDKSRWQQGNVFSCSVMHEALHNHYTQKSLSLSPGS

SEQ ID NO: 592 - protein, 470 aa, synthetic construct
  REGION 1..470: note = Synthetic
GEVFNATRFASVYAWNRKRISNCVADYSVLYNSASFSTFKCYGVSPTKLNDLCFTNVYADSFVIRGDEVRQIAPGQTGKIADYNYKLPDDFTGCVIAWNSNNLDSKVGGNYNYLYRLFRKSNLKPFERDISTEIYQAGSTPCNGVEGFNCYFPLQSYGFQPTNGVGYQPYRVVVLSFELLHAPATVCGPKKSTNLVKNKCVNFNFNGLTGTGVLTESNKKFLPFQQFGRDGSGGGGDGGGGSGDKTHTCPPCPAPELLGGPSVFLFPPKPKDTLMISRTPEVTCVVVDVSHEDPEVKFNWYVDGVEVHNAKTKPREEQYNSTYRVVSVLTVLHQDWLNGKEYKCKVSNKALPAPIEKTISKAKGQPREPQVYTLPPSREELTKNQVSLTCLVKGFYPSDIAVEWESNGQPENNYKTTPPVLDSDGSFFLYSKLTVDKSRWQQGNVFSCSVMHEALHNHYTQKSLSLSPGS

SEQ ID NO: 593 - protein, 469 aa, synthetic construct
  REGION 1..469: note = Synthetic
EVFNATRFASVYAWNRKRISNCVADYSVLYNSASFSTFKCYGVSPTKLNDLCFTNVYADSFVIRGDEVRQIAPGQTGKIADYNYKLPDDFTGCVIAWNSNNLDSKVGGNYNYLYRLFRKSNLKPFERDISTEIYQAGSTPCNGVEGFNCYFPLQSYGFQPTNGVGYQPYRVVVLSFELLHAPATVCGPKKSTNLVKNKCVNFNFNGLTGTGVLTESNKKFLPFQQFGRDGSGGGGDGGGGSGDKTHTCPPCPAPELLGGPSVFLFPPKPKDTLMISRTPEVTCVVVDVSHEDPEVKFNWYVDGVEVHNAKTKPREEQYNSTYRVVSVLTVLHQDWLNGKEYKCKVSNKALPAPIEKTISKAKGQPREPQVYTLPPSREELTKNQVSLTCLVKGFYPSDIAVEWESNGQPENNYKTTPPVLDSDGSFFLYSKLTVDKSRWQQGNVFSCSVMHEALHNHYTQKSLSLSPGS

SEQ ID NO: 594 - protein, 468 aa, synthetic construct
  REGION 1..468: note = Synthetic
VFNATRFASVYAWNRKRISNCVADYSVLYNSASFSTFKCYGVSPTKLNDLCFTNVYADSFVIRGDEVRQIAPGQTGKIADYNYKLPDDFTGCVIAWNSNNLDSKVGGNYNYLYRLFRKSNLKPFERDISTEIYQAGSTPCNGVEGFNCYFPLQSYGFQPTNGVGYQPYRVVVLSFELLHAPATVCGPKKSTNLVKNKCVNFNFNGLTGTGVLTESNKKFLPFQQFGRDGSGGGGDGGGGSGDKTHTCPPCPAPELLGGPSVFLFPPKPKDTLMISRTPEVTCVVVDVSHEDPEVKFNWYVDGVEVHNAKTKPREEQYNSTYRVVSVLTVLHQDWLNGKEYKCKVSNKALPAPIEKTISKAKGQPREPQVYTLPPSREELTKNQVSLTCLVKGFYPSDIAVEWESNGQPENNYKTTPPVLDSDGSFFLYSKLTVDKSRWQQGNVFSCSVMHEALHNHYTQKSLSLSPGS

SEQ ID NO: 595 - protein, 467 aa, synthetic construct
  REGION 1..467: note = Synthetic
FNATRFASVYAWNRKRISNCVADYSVLYNSASFSTFKCYGVSPTKLNDLCFTNVYADSFVIRGDEVRQIAPGQTGKIADYNYKLPDDFTGCVIAWNSNNLDSKVGGNYNYLYRLFRKSNLKPFERDISTEIYQAGSTPCNGVEGFNCYFPLQSYGFQPTNGVGYQPYRVVVLSFELLHAPATVCGPKKSTNLVKNKCVNFNFNGLTGTGVLTESNKKFLPFQQFGRDGSGGGGDGGGGSGDKTHTCPPCPAPELLGGPSVFLFPPKPKDTLMISRTPEVTCVVVDVSHEDPEVKFNWYVDGVEVHNAKTKPREEQYNSTYRVVSVLTVLHQDWLNGKEYKCKVSNKALPAPIEKTISKAKGQPREPQVYTLPPSREELTKNQVSLTCLVKGFYPSDIAVEWESNGQPENNYKTTPPVLDSDGSFFLYSKLTVDKSRWQQGNVFSCSVMHEALHNHYTQKSLSLSPGS

SEQ ID NO: 596 - protein, 466 aa, synthetic construct
  REGION 1..466: note = Synthetic
NATRFASVYAWNRKRISNCVADYSVLYNSASFSTFKCYGVSPTKLNDLCFTNVYADSFVIRGDEVRQIAPGQTGKIADYNYKLPDDFTGCVIAWNSNNLDSKVGGNYNYLYRLFRKSNLKPFERDISTEIYQAGSTPCNGVEGFNCYFPLQSYGFQPTNGVGYQPYRVVVLSFELLHAPATVCGPKKSTNLVKNKCVNFNFNGLTGTGVLTESNKKFLPFQQFGRDGSGGGGDGGGGSGDKTHTCPPCPAPELLGGPSVFLFPPKPKDTLMISRTPEVTCVVVDVSHEDPEVKFNWYVDGVEVHNAKTKPREEQYNSTYRVVSVLTVLHQDWLNGKEYKCKVSNKALPAPIEKTISKAKGQPREPQVYTLPPSREELTKNQVSLTCLVKGFYPSDIAVEWESNGQPENNYKTTPPVLDSDGSFFLYSKLTVDKSRWQQGNVFSCSVMHEALHNHYTQKSLSLSPGS

SEQ ID NO: 597 - protein, 465 aa, synthetic construct
  REGION 1..465: note = Synthetic
ATRFASVYAWNRKRISNCVADYSVLYNSASFSTFKCYGVSPTKLNDLCFTNVYADSFVIRGDEVRQIAPGQTGKIADYNYKLPDDFTGCVIAWNSNNLDSKVGGNYNYLYRLFRKSNLKPFERDISTEIYQAGSTPCNGVEGFNCYFPLQSYGFQPTNGVGYQPYRVVVLSFELLHAPATVCGPKKSTNLVKNKCVNFNFNGLTGTGVLTESNKKFLPFQQFGRDGSGGGGDGGGGSGDKTHTCPPCPAPELLGGPSVFLFPPKPKDTLMISRTPEVTCVVVDVSHEDPEVKFNWYVDGVEVHNAKTKPREEQYNSTYRVVSVLTVLHQDWLNGKEYKCKVSNKALPAPIEKTISKAKGQPREPQVYTLPPSREELTKNQVSLTCLVKGFYPSDIAVEWESNGQPENNYKTTPPVLDSDGSFFLYSKLTVDKSRWQQGNVFSCSVMHEALHNHYTQKSLSLSPGS

SEQ ID NO: 598 - protein, 464 aa, synthetic construct
  REGION 1..464: note = Synthetic
TRFASVYAWNRKRISNCVADYSVLYNSASFSTFKCYGVSPTKLNDLCFTNVYADSFVIRGDEVRQIAPGQTGKIADYNYKLPDDFTGCVIAWNSNNLDSKVGGNYNYLYRLFRKSNLKPFERDISTEIYQAGSTPCNGVEGFNCYFPLQSYGFQPTNGVGYQPYRVVVLSFELLHAPATVCGPKKSTNLVKNKCVNFNFNGLTGTGVLTESNKKFLPFQQFGRDGSGGGGDGGGGSGDKTHTCPPCPAPELLGGPSVFLFPPKPKDTLMISRTPEVTCVVVDVSHEDPEVKFNWYVDGVEVHNAKTKPREEQYNSTYRVVSVLTVLHQDWLNGKEYKCKVSNKALPAPIEKTISKAKGQPREPQVYTLPPSREELTKNQVSLTCLVKGFYPSDIAVEWESNGQPENNYKTTPPVLDSDGSFFLYSKLTVDKSRWQQGNVFSCSVMHEALHNHYTQKSLSLSPGS

SEQ ID NO: 599 - protein, 463 aa, synthetic construct
  REGION 1..463: note = Synthetic
RFASVYAWNRKRISNCVADYSVLYNSASFSTFKCYGVSPTKLNDLCFTNVYADSFVIRGDEVRQIAPGQTGKIADYNYKLPDDFTGCVIAWNSNNLDSKVGGNYNYLYRLFRKSNLKPFERDISTEIYQAGSTPCNGVEGFNCYFPLQSYGFQPTNGVGYQPYRVVVLSFELLHAPATVCGPKKSTNLVKNKCVNFNFNGLTGTGVLTESNKKFLPFQQFGRDGSGGGGDGGGGSGDKTHTCPPCPAPELLGGPSVFLFPPKPKDTLMISRTPEVTCVVVDVSHEDPEVKFNWYVDGVEVHNAKTKPREEQYNSTYRVVSVLTVLHQDWLNGKEYKCKVSNKALPAPIEKTISKAKGQPREPQVYTLPPSREELTKNQVSLTCLVKGFYPSDIAVEWESNGQPENNYKTTPPVLDSDGSFFLYSKLTVDKSRWQQGNVFSCSVMHEALHNHYTQKSLSLSPGS

SEQ ID NO: 600 - protein, 462 aa, synthetic construct
  REGION 1..462: note = Synthetic
FASVYAWNRKRISNCVADYSVLYNSASFSTFKCYGVSPTKLNDLCFTNVYADSFVIRGDEVRQIAPGQTGKIADYNYKLPDDFTGCVIAWNSNNLDSKVGGNYNYLYRLFRKSNLKPFERDISTEIYQAGSTPCNGVEGFNCYFPLQSYGFQPTNGVGYQPYRVVVLSFELLHAPATVCGPKKSTNLVKNKCVNFNFNGLTGTGVLTESNKKFLPFQQFGRDGSGGGGDGGGGSGDKTHTCPPCPAPELLGGPSVFLFPPKPKDTLMISRTPEVTCVVVDVSHEDPEVKFNWYVDGVEVHNAKTKPREEQYNSTYRVVSVLTVLHQDWLNGKEYKCKVSNKALPAPIEKTISKAKGQPREPQVYTLPPSREELTKNQVSLTCLVKGFYPSDIAVEWESNGQPENNYKTTPPVLDSDGSFFLYSKLTVDKSRWQQGNVFSCSVMHEALHNHYTQKSLSLSPGS

SEQ ID NO: 601 - protein, 461 aa, synthetic construct
  REGION 1..461: note = Synthetic
ASVYAWNRKRISNCVADYSVLYNSASFSTFKCYGVSPTKLNDLCFTNVYADSFVIRGDEVRQIAPGQTGKIADYNYKLPDDFTGCVIAWNSNNLDSKVGGNYNYLYRLFRKSNLKPFERDISTEIYQAGSTPCNGVEGFNCYFPLQSYGFQPTNGVGYQPYRVVVLSFELLHAPATVCGPKKSTNLVKNKCVNFNFNGLTGTGVLTESNKKFLPFQQFGRDGSGGGGDGGGGSGDKTHTCPPCPAPELLGGPSVFLFPPKPKDTLMISRTPEVTCVVVDVSHEDPEVKFNWYVDGVEVHNAKTKPREEQYNSTYRVVSVLTVLHQDWLNGKEYKCKVSNKALPAPIEKTISKAKGQPREPQVYTLPPSREELTKNQVSLTCLVKGFYPSDIAVEWESNGQPENNYKTTPPVLDSDGSFFLYSKLTVDKSRWQQGNVFSCSVMHEALHNHYTQKSLSLSPGS

SEQ ID NO: 602 - protein, 460 aa, synthetic construct
  REGION 1..460: note = Synthetic
SVYAWNRKRISNCVADYSVLYNSASFSTFKCYGVSPTKLNDLCFTNVYADSFVIRGDEVRQIAPGQTGKIADYNYKLPDDFTGCVIAWNSNNLDSKVGGNYNYLYRLFRKSNLKPFERDISTEIYQAGSTPCNGVEGFNCYFPLQSYGFQPTNGVGYQPYRVVVLSFELLHAPATVCGPKKSTNLVKNKCVNFNFNGLTGTGVLTESNKKFLPFQQFGRDGSGGGGDGGGGSGDKTHTCPPCPAPELLGGPSVFLFPPKPKDTLMISRTPEVTCVVVDVSHEDPEVKFNWYVDGVEVHNAKTKPREEQYNSTYRVVSVLTVLHQDWLNGKEYKCKVSNKALPAPIEKTISKAKGQPREPQVYTLPPSREELTKNQVSLTCLVKGFYPSDIAVEWESNGQPENNYKTTPPVLDSDGSFFLYSKLTVDKSRWQQGNVFSCSVMHEALHNHYTQKSLSLSPGS

SEQ ID NO: 603 - protein, 459 aa, synthetic construct
  REGION 1..459: note = Synthetic
VYAWNRKRISNCVADYSVLYNSASFSTFKCYGVSPTKLNDLCFTNVYADSFVIRGDEVRQIAPGQTGKIADYNYKLPDDFTGCVIAWNSNNLDSKVGGNYNYLYRLFRKSNLKPFERDISTEIYQAGSTPCNGVEGFNCYFPLQSYGFQPTNGVGYQPYRVVVLSFELLHAPATVCGPKKSTNLVKNKCVNFNFNGLTGTGVLTESNKKFLPFQQFGRDGSGGGGDGGGGSGDKTHTCPPCPAPELLGGPSVFLFPPKPKDTLMISRTPEVTCVVVDVSHEDPEVKFNWYVDGVEVHNAKTKPREEQYNSTYRVVSVLTVLHQDWLNGKEYKCKVSNKALPAPIEKTISKAKGQPREPQVYTLPPSREELTKNQVSLTCLVKGFYPSDIAVEWESNGQPENNYKTTPPVLDSDGSFFLYSKLTVDKSRWQQGNVFSCSVMHEALHNHYTQKSLSLSPGS

SEQ ID NO: 604 - protein, 458 aa, synthetic construct
  REGION 1..458: note = Synthetic
YAWNRKRISNCVADYSVLYNSASFSTFKCYGVSPTKLNDLCFTNVYADSFVIRGDEVRQIAPGQTGKIADYNYKLPDDFTGCVIAWNSNNLDSKVGGNYNYLYRLFRKSNLKPFERDISTEIYQAGSTPCNGVEGFNCYFPLQSYGFQPTNGVGYQPYRVVVLSFELLHAPATVCGPKKSTNLVKNKCVNFNFNGLTGTGVLTESNKKFLPFQQFGRDGSGGGGDGGGGSGDKTHTCPPCPAPELLGGPSVFLFPPKPKDTLMISRTPEVTCVVVDVSHEDPEVKFNWYVDGVEVHNAKTKPREEQYNSTYRVVSVLTVLHQDWLNGKEYKCKVSNKALPAPIEKTISKAKGQPREPQVYTLPPSREELTKNQVSLTCLVKGFYPSDIAVEWESNGQPENNYKTTPPVLDSDGSFFLYSKLTVDKSRWQQGNVFSCSVMHEALHNHYTQKSLSLSPGS

SEQ ID NO: 605 - protein, 457 aa, synthetic construct
  REGION 1..457: note = Synthetic
AWNRKRISNCVADYSVLYNSASFSTFKCYGVSPTKLNDLCFTNVYADSFVIRGDEVRQIAPGQTGKIADYNYKLPDDFTGCVIAWNSNNLDSKVGGNYNYLYRLFRKSNLKPFERDISTEIYQAGSTPCNGVEGFNCYFPLQSYGFQPTNGVGYQPYRVVVLSFELLHAPATVCGPKKSTNLVKNKCVNFNFNGLTGTGVLTESNKKFLPFQQFGRDGSGGGGDGGGGSGDKTHTCPPCPAPELLGGPSVFLFPPKPKDTLMISRTPEVTCVVVDVSHEDPEVKFNWYVDGVEVHNAKTKPREEQYNSTYRVVSVLTVLHQDWLNGKEYKCKVSNKALPAPIEKTISKAKGQPREPQVYTLPPSREELTKNQVSLTCLVKGFYPSDIAVEWESNGQPENNYKTTPPVLDSDGSFFLYSKLTVDKSRWQQGNVFSCSVMHEALHNHYTQKSLSLSPGS

SEQ ID NO: 606 - protein, 456 aa, synthetic construct
  REGION 1..456: note = Synthetic
WNRKRISNCVADYSVLYNSASFSTFKCYGVSPTKLNDLCFTNVYADSFVIRGDEVRQIAPGQTGKIADYNYKLPDDFTGCVIAWNSNNLDSKVGGNYNYLYRLFRKSNLKPFERDISTEIYQAGSTPCNGVEGFNCYFPLQSYGFQPTNGVGYQPYRVVVLSFELLHAPATVCGPKKSTNLVKNKCVNFNFNGLTGTGVLTESNKKFLPFQQFGRDGSGGGGDGGGGSGDKTHTCPPCPAPELLGGPSVFLFPPKPKDTLMISRTPEVTCVVVDVSHEDPEVKFNWYVDGVEVHNAKTKPREEQYNSTYRVVSVLTVLHQDWLNGKEYKCKVSNKALPAPIEKTISKAKGQPREPQVYTLPPSREELTKNQVSLTCLVKGFYPSDIAVEWESNGQPENNYKTTPPVLDSDGSFFLYSKLTVDKSRWQQGNVFSCSVMHEALHNHYTQKSLSLSPGS

SEQ ID NO: 607 - protein, 455 aa, synthetic construct
  REGION 1..455: note = Synthetic
NRKRISNCVADYSVLYNSASFSTFKCYGVSPTKLNDLCFTNVYADSFVIRGDEVRQIAPGQTGKIADYNYKLPDDFTGCVIAWNSNNLDSKVGGNYNYLYRLFRKSNLKPFERDISTEIYQAGSTPCNGVEGFNCYFPLQSYGFQPTNGVGYQPYRVVVLSFELLHAPATVCGPKKSTNLVKNKCVNFNFNGLTGTGVLTESNKKFLPFQQFGRDGSGGGGDGGGGSGDKTHTCPPCPAPELLGGPSVFLFPPKPKDTLMISRTPEVTCVVVDVSHEDPEVKFNWYVDGVEVHNAKTKPREEQYNSTYRVVSVLTVLHQDWLNGKEYKCKVSNKALPAPIEKTISKAKGQPREPQVYTLPPSREELTKNQVSLTCLVKGFYPSDIAVEWESNGQPENNYKTTPPVLDSDGSFFLYSKLTVDKSRWQQGNVFSCSVMHEALHNHYTQKSLSLSPGS

SEQ ID NO: 608 - protein, 454 aa, synthetic construct
  REGION 1..454: note = Synthetic
RKRISNCVADYSVLYNSASFSTFKCYGVSPTKLNDLCFTNVYADSFVIRGDEVRQIAPGQTGKIADYNYKLPDDFTGCVIAWNSNNLDSKVGGNYNYLYRLFRKSNLKPFERDISTEIYQAGSTPCNGVEGFNCYFPLQSYGFQPTNGVGYQPYRVVVLSFELLHAPATVCGPKKSTNLVKNKCVNFNFNGLTGTGVLTESNKKFLPFQQFGRDGSGGGGDGGGGSGDKTHTCPPCPAPELLGGPSVFLFPPKPKDTLMISRTPEVTCVVVDVSHEDPEVKFNWYVDGVEVHNAKTKPREEQYNSTYRVVSVLTVLHQDWLNGKEYKCKVSNKALPAPIEKTISKAKGQPREPQVYTLPPSREELTKNQVSLTCLVKGFYPSDIAVEWESNGQPENNYKTTPPVLDSDGSFFLYSKLTVDKSRWQQGNVFSCSVMHEALHNHYTQKSLSLSPGS

SEQ ID NO: 609 - protein, 453 aa, synthetic construct
  REGION 1..453: note = Synthetic
KRISNCVADYSVLYNSASFSTFKCYGVSPTKLNDLCFTNVYADSFVIRGDEVRQIAPGQTGKIADYNYKLPDDFTGCVIAWNSNNLDSKVGGNYNYLYRLFRKSNLKPFERDISTEIYQAGSTPCNGVEGFNCYFPLQSYGFQPTNGVGYQPYRVVVLSFELLHAPATVCGPKKSTNLVKNKCVNFNFNGLTGTGVLTESNKKFLPFQQFGRDGSGGGGDGGGGSGDKTHTCPPCPAPELLGGPSVFLFPPKPKDTLMISRTPEVTCVVVDVSHEDPEVKFNWYVDGVEVHNAKTKPREEQYNSTYRVVSVLTVLHQDWLNGKEYKCKVSNKALPAPIEKTISKAKGQPREPQVYTLPPSREELTKNQVSLTCLVKGFYPSDIAVEWESNGQPENNYKTTPPVLDSDGSFFLYSKLTVDKSRWQQGNVFSCSVMHEALHNHYTQKSLSLSPGS

SEQ ID NO: 610 - protein, 452 aa, synthetic construct
  REGION 1..452: note = Synthetic
RISNCVADYSVLYNSASFSTFKCYGVSPTKLNDLCFTNVYADSFVIRGDEVRQIAPGQTGKIADYNYKLPDDFTGCVIAWNSNNLDSKVGGNYNYLYRLFRKSNLKPFERDISTEIYQAGSTPCNGVEGFNCYFPLQSYGFQPTNGVGYQPYRVVVLSFELLHAPATVCGPKKSTNLVKNKCVNFNFNGLTGTGVLTESNKKFLPFQQFGRDGSGGGGDGGGGSGDKTHTCPPCPAPELLGGPSVFLFPPKPKDTLMISRTPEVTCVVVDVSHEDPEVKFNWYVDGVEVHNAKTKPREEQYNSTYRVVSVLTVLHQDWLNGKEYKCKVSNKALPAPIEKTISKAKGQPREPQVYTLPPSREELTKNQVSLTCLVKGFYPSDIAVEWESNGQPENNYKTTPPVLDSDGSFFLYSKLTVDKSRWQQGNVFSCSVMHEALHNHYTQKSLSLSPGS

SEQ ID NO: 611 - protein, 451 aa, synthetic construct
  REGION 1..451: note = Synthetic
ISNCVADYSVLYNSASFSTFKCYGVSPTKLNDLCFTNVYADSFVIRGDEVRQIAPGQTGKIADYNYKLPDDFTGCVIAWNSNNLDSKVGGNYNYLYRLFRKSNLKPFERDISTEIYQAGSTPCNGVEGFNCYFPLQSYGFQPTNGVGYQPYRVVVLSFELLHAPATVCGPKKSTNLVKNKCVNFNFNGLTGTGVLTESNKKFLPFQQFGRDGSGGGGDGGGGSGDKTHTCPPCPAPELLGGPSVFLFPPKPKDTLMISRTPEVTCVVVDVSHEDPEVKFNWYVDGVEVHNAKTKPREEQYNSTYRVVSVLTVLHQDWLNGKEYKCKVSNKALPAPIEKTISKAKGQPREPQVYTLPPSREELTKNQVSLTCLVKGFYPSDIAVEWESNGQPENNYKTTPPVLDSDGSFFLYSKLTVDKSRWQQGNVFSCSVMHEALHNHYTQKSLSLSPGS

SEQ ID NO: 612 - protein, 450 aa, synthetic construct
  REGION 1..450: note = Synthetic
SNCVADYSVLYNSASFSTFKCYGVSPTKLNDLCFTNVYADSFVIRGDEVRQIAPGQTGKIADYNYKLPDDFTGCVIAWNSNNLDSKVGGNYNYLYRLFRKSNLKPFERDISTEIYQAGSTPCNGVEGFNCYFPLQSYGFQPTNGVGYQPYRVVVLSFELLHAPATVCGPKKSTNLVKNKCVNFNFNGLTGTGVLTESNKKFLPFQQFGRDGSGGGGDGGGGSGDKTHTCPPCPAPELLGGPSVFLFPPKPKDTLMISRTPEVTCVVVDVSHEDPEVKFNWYVDGVEVHNAKTKPREEQYNSTYRVVSVLTVLHQDWLNGKEYKCKVSNKALPAPIEKTISKAKGQPREPQVYTLPPSREELTKNQVSLTCLVKGFYPSDIAVEWESNGQPENNYKTTPPVLDSDGSFFLYSKLTVDKSRWQQGNVFSCSVMHEALHNHYTQKSLSLSPGS

SEQ ID NO: 613 - protein, 449 aa, synthetic construct
  REGION 1..449: note = Synthetic
NCVADYSVLYNSASFSTFKCYGVSPTKLNDLCFTNVYADSFVIRGDEVRQIAPGQTGKIADYNYKLPDDFTGCVIAWNSNNLDSKVGGNYNYLYRLFRKSNLKPFERDISTEIYQAGSTPCNGVEGFNCYFPLQSYGFQPTNGVGYQPYRVVVLSFELLHAPATVCGPKKSTNLVKNKCVNFNFNGLTGTGVLTESNKKFLPFQQFGRDGSGGGGDGGGGSGDKTHTCPPCPAPELLGGPSVFLFPPKPKDTLMISRTPEVTCVVVDVSHEDPEVKFNWYVDGVEVHNAKTKPREEQYNSTYRVVSVLTVLHQDWLNGKEYKCKVSNKALPAPIEKTISKAKGQPREPQVYTLPPSREELTKNQVSLTCLVKGFYPSDIAVEWESNGQPENNYKTTPPVLDSDGSFFLYSKLTVDKSRWQQGNVFSCSVMHEALHNHYTQKSLSLSPGS

SEQ ID NO: 614 - protein, 448 aa, synthetic construct
  REGION 1..448: note = Synthetic
CVADYSVLYNSASFSTFKCYGVSPTKLNDLCFTNVYADSFVIRGDEVRQIAPGQTGKIADYNYKLPDDFTGCVIAWNSNNLDSKVGGNYNYLYRLFRKSNLKPFERDISTEIYQAGSTPCNGVEGFNCYFPLQSYGFQPTNGVGYQPYRVVVLSFELLHAPATVCGPKKSTNLVKNKCVNFNFNGLTGTGVLTESNKKFLPFQQFGRDGSGGGGDGGGGSGDKTHTCPPCPAPELLGGPSVFLFPPKPKDTLMISRTPEVTCVVVDVSHEDPEVKFNWYVDGVEVHNAKTKPREEQYNSTYRVVSVLTVLHQDWLNGKEYKCKVSNKALPAPIEKTISKAKGQPREPQVYTLPPSREELTKNQVSLTCLVKGFYPSDIAVEWESNGQPENNYKTTPPVLDSDGSFFLYSKLTVDKSRWQQGNVFSCSVMHEALHNHYTQKSLSLSPGS

SEQ ID NO: 615 - protein, 447 aa, synthetic construct
  REGION 1..447: note = Synthetic
VADYSVLYNSASFSTFKCYGVSPTKLNDLCFTNVYADSFVIRGDEVRQIAPGQTGKIADYNYKLPDDFTGCVIAWNSNNLDSKVGGNYNYLYRLFRKSNLKPFERDISTEIYQAGSTPCNGVEGFNCYFPLQSYGFQPTNGVGYQPYRVVVLSFELLHAPATVCGPKKSTNLVKNKCVNFNFNGLTGTGVLTESNKKFLPFQQFGRDGSGGGGDGGGGSGDKTHTCPPCPAPELLGGPSVFLFPPKPKDTLMISRTPEVTCVVVDVSHEDPEVKFNWYVDGVEVHNAKTKPREEQYNSTYRVVSVLTVLHQDWLNGKEYKCKVSNKALPAPIEKTISKAKGQPREPQVYTLPPSREELTKNQVSLTCLVKGFYPSDIAVEWESNGQPENNYKTTPPVLDSDGSFFLYSKLTVDKSRWQQGNVFSCSVMHEALHNHYTQKSLSLSPGS

SEQ ID NO: 616 - protein, 446 aa, synthetic construct
  REGION 1..446: note = Synthetic
ADYSVLYNSASFSTFKCYGVSPTKLNDLCFTNVYADSFVIRGDEVRQIAPGQTGKIADYNYKLPDDFTGCVIAWNSNNLDSKVGGNYNYLYRLFRKSNLKPFERDISTEIYQAGSTPCNGVEGFNCYFPLQSYGFQPTNGVGYQPYRVVVLSFELLHAPATVCGPKKSTNLVKNKCVNFNFNGLTGTGVLTESNKKFLPFQQFGRDGSGGGGDGGGGSGDKTHTCPPCPAPELLGGPSVFLFPPKPKDTLMISRTPEVTCVVVDVSHEDPEVKFNWYVDGVEVHNAKTKPREEQYNSTYRVVSVLTVLHQDWLNGKEYKCKVSNKALPAPIEKTISKAKGQPREPQVYTLPPSREELTKNQVSLTCLVKGFYPSDIAVEWESNGQPENNYKTTPPVLDSDGSFFLYSKLTVDKSRWQQGNVFSCSVMHEALHNHYTQKSLSLSPGS

SEQ ID NO: 617 - protein, 445 aa, synthetic construct
  REGION 1..445: note = Synthetic
DYSVLYNSASFSTFKCYGVSPTKLNDLCFTNVYADSFVIRGDEVRQIAPGQTGKIADYNYKLPDDFTGCVIAWNSNNLDSKVGGNYNYLYRLFRKSNLKPFERDISTEIYQAGSTPCNGVEGFNCYFPLQSYGFQPTNGVGYQPYRVVVLSFELLHAPATVCGPKKSTNLVKNKCVNFNFNGLTGTGVLTESNKKFLPFQQFGRDGSGGGGDGGGGSGDKTHTCPPCPAPELLGGPSVFLFPPKPKDTLMISRTPEVTCVVVDVSHEDPEVKFNWYVDGVEVHNAKTKPREEQYNSTYRVVSVLTVLHQDWLNGKEYKCKVSNKALPAPIEKTISKAKGQPREPQVYTLPPSREELTKNQVSLTCLVKGFYPSDIAVEWESNGQPENNYKTTPPVLDSDGSFFLYSKLTVDKSRWQQGNVFSCSVMHEALHNHYTQKSLSLSPGS

SEQ ID NO: 618 - protein, 444 aa, synthetic construct
  REGION 1..444: note = Synthetic
YSVLYNSASFSTFKCYGVSPTKLNDLCFTNVYADSFVIRGDEVRQIAPGQTGKIADYNYKLPDDFTGCVIAWNSNNLDSKVGGNYNYLYRLFRKSNLKPFERDISTEIYQAGSTPCNGVEGFNCYFPLQSYGFQPTNGVGYQPYRVVVLSFELLHAPATVCGPKKSTNLVKNKCVNFNFNGLTGTGVLTESNKKFLPFQQFGRDGSGGGGDGGGGSGDKTHTCPPCPAPELLGGPSVFLFPPKPKDTLMISRTPEVTCVVVDVSHEDPEVKFNWYVDGVEVHNAKTKPREEQYNSTYRVVSVLTVLHQDWLNGKEYKCKVSNKALPAPIEKTISKAKGQPREPQVYTLPPSREELTKNQVSLTCLVKGFYPSDIAVEWESNGQPENNYKTTPPVLDSDGSFFLYSKLTVDKSRWQQGNVFSCSVMHEALHNHYTQKSLSLSPGS

SEQ ID NO: 619 - protein, 443 aa, synthetic construct
  REGION 1..443: note = Synthetic
SVLYNSASFSTFKCYGVSPTKLNDLCFTNVYADSFVIRGDEVRQIAPGQTGKIADYNYKLPDDFTGCVIAWNSNNLDSKVGGNYNYLYRLFRKSNLKPFERDISTEIYQAGSTPCNGVEGFNCYFPLQSYGFQPTNGVGYQPYRVVVLSFELLHAPATVCGPKKSTNLVKNKCVNFNFNGLTGTGVLTESNKKFLPFQQFGRDGSGGGGDGGGGSGDKTHTCPPCPAPELLGGPSVFLFPPKPKDTLMISRTPEVTCVVVDVSHEDPEVKFNWYVDGVEVHNAKTKPREEQYNSTYRVVSVLTVLHQDWLNGKEYKCKVSNKALPAPIEKTISKAKGQPREPQVYTLPPSREELTKNQVSLTCLVKGFYPSDIAVEWESNGQPENNYKTTPPVLDSDGSFFLYSKLTVDKSRWQQGNVFSCSVMHEALHNHYTQKSLSLSPGS

SEQ ID NO: 620 - DNA, 1467 bp, synthetic construct
  misc_feature 1..1467: note = Synthetic
  source 1..1467: mol_type = other DNA
agggttcagcccaccgaatcaatagtacggttcccaaatatcactaatctttgccccttcggggaagtatttaacgctactcgatttgctagcgtatatgcctggaaccggaagagaataagcaactgtgttgcagactatagcgtgctttacaattccgcatcctttagtaccttcaaatgttacggtgtgagccccaccaaactcaatgatctctgtttcacaaacgtgtacgcagatagtttcgttatacgcggggacgaagtacggcagatagcccctggccagacaggaaagatagccgattacaactacaaacttccagacgattttacagggtgtgtgatcgcttggaattcaaataacctggactccaaagtgggaggcaactataattacctgtaccgactgttccgcaaaagcaacttgaaacctttcgagcgagatatatcaaccgaaatctaccaagctggttctacaccttgtaatggtgtggagggatttaactgctacttccctcttcagtcctatggatttcagcctacaaatggagtcgggtatcaaccctatagagtcgtggtgttgtcatttgaacttctccatgcacctgctactgtctgtggtccaaaaaagtccactaatcttgtaaaaaacaaatgcgtgaacttcaatttcaatggcctcaccggaacaggtgttttgacagaatctaacaaaaaattccttcccttccagcaattcgggagaggatccggcggcggcggtgacggtggtggcggctccggagacaagacccacacctgccccccttgtcctgcccctgagctgctgggcggaccctccgtgtttctgttcccccccaagcccaaggacaccctgatgatcagccggacccccgaggtcacctgcgtggtggtggacgtcagccacgaggacccagaggtcaagttcaattggtatgtggacggcgtggaggtgcacaacgccaagaccaagccccgggaggaacagtacaacagcacctaccgggtggtgtccgtgctgaccgtgctgcaccaggactggctgaacggcaaagaatacaagtgcaaggtgtccaacaaggccctgcctgcccccatcgagaaaaccatcagcaaggccaagggccagcccagagaaccccaggtgtacaccctgccccctagcagggaagagctgaccaagaaccaggtgtccctgacctgtctggtcaagggcttctaccccagcgatatcgccgtggagtgggagagcaacggccagcctgagaacaactacaagaccaccccccctgtgctggacagcgacggcagcttcttcctgtacagcaagctgaccgtggacaagagccggtggcagcagggcaacgtgtttagctgcagcgtgatgcacgaggccctgcacaaccactacacccagaagagcttaagcctgtcccctggcagt

SEQ ID NO: 621 - DNA, 1464 bp, synthetic construct
  misc_feature 1..1464: note = Synthetic
  source 1..1464: mol_type = other DNA
agggttcagcccaccgaatcaatagtacggttcccaaatatcactaatctttgccccttcggggaagtatttaacgctactcgatttgctagcgtatatgcctggaaccggaagagaataagcaactgtgttgcagactatagcgtgctttacaattccgcatcctttagtaccttcaaatgttacggtgtgagccccaccaaactcaatgatctctgtttcacaaacgtgtacgcagatagtttcgttatacgcggggacgaagtacggcagatagcccctggccagacaggaaagatagccgattacaactacaaacttccagacgattttacagggtgtgtgatcgcttggaattcaaataacctggactccaaagtgggaggcaactataattacctgtaccgactgttccgcaaaagcaacttgaaacctttcgagcgagatatatcaaccgaaatctaccaagctggttctacaccttgtaatggtgtggagggatttaactgctacttccctcttcagtcctatggatttcagcctacaaatggagtcgggtatcaaccctatagagtcgtggtgttgtcatttgaacttctccatgcacctgctactgtctgtggtccaaaaaagtccactaatcttgtaaaaaacaaatgcgtgaacttcaatttcaatggcctcaccggaacaggtgttttgacagaatctaacaaaaaattccttcccttccagcaattcgggggatccggcggcggcggtgacggtggtggcggctccggagacaagacccacacctgccccccttgtcctgcccctgagctgctgggcggaccctccgtgtttctgttcccccccaagcccaaggacaccctgatgatcagccggacccccgaggtcacctgcgtggtggtggacgtcagccacgaggacccagaggtcaagttcaattggtatgtggacggcgtggaggtgcacaacgccaagaccaagccccgggaggaacagtacaacagcacctaccgggtggtgtccgtgctgaccgtgctgcaccaggactggctgaacggcaaagaatacaagtgcaaggtgtccaacaaggccctgcctgcccccatcgagaaaaccatcagcaaggccaagggccagcccagagaaccccaggtgtacaccctgccccctagcagggaagagctgaccaagaaccaggtgtccctgacctgtctggtcaagggcttctaccccagcgatatcgccgtggagtgggagagcaacggccagcctgagaacaactacaagaccaccccccctgtgctggacagcgacggcagcttcttcctgtacagcaagctgaccgtggacaagagccggtggcagcagggcaacgtgtttagctgcagcgtgatgcacgaggccctgcacaaccactacacccagaagagcttaagcctgtcccctggcagt

SEQ ID NO: 622 - DNA, 1461 bp, synthetic construct
  misc_feature 1..1461: note = Synthetic
  source 1..1461: mol_type = other DNA
agggttcagcccaccgaatcaatagtacggttcccaaatatcactaatctttgccccttcggggaagtatttaacgctactcgatttgctagcgtatatgcctggaaccggaagagaataagcaactgtgttgcagactatagcgtgctttacaattccgcatcctttagtaccttcaaatgttacggtgtgagccccaccaaactcaatgatctctgtttcacaaacgtgtacgcagatagtttcgttatacgcggggacgaagtacggcagatagcccctggccagacaggaaagatagccgattacaactacaaacttccagacgattttacagggtgtgtgatcgcttggaattcaaataacctggactccaaagtgggaggcaactataattacctgtaccgactgttccgcaaaagcaacttgaaacctttcgagcgagatatatcaaccgaaatctaccaagctggttctacaccttgtaatggtgtggagggatttaactgctacttccctcttcagtcctatggatttcagcctacaaatggagtcgggtatcaaccctatagagtcgtggtgttgtcatttgaacttctccatgcacctgctactgtctgtggtccaaaaaagtccactaatcttgtaaaaaacaaatgcgtgaacttcaatttcaatggcctcaccggaacaggtgttttgacagaatctaacaaaaaattccttcccttccagcaattcggatccggcggcggcggtgacggtggtggcggctccggagacaagacccacacctgccccccttgtcctgcccctgagctgctgggcggaccctccgtgtttctgttcccccccaagcccaaggacaccctgatgatcagccggacccccgaggtcacctgcgtggtggtggacgtcagccacgaggacccagaggtcaagttcaattggtatgtggacggcgtggaggtgcacaacgccaagaccaagccccgggaggaacagtacaacagcacctaccgggtggtgtccgtgctgaccgtgctgcaccaggactggctgaacggcaaagaatacaagtgcaaggtgtccaacaaggccctgcctgcccccatcgagaaaaccatcagcaaggccaagggccagcccagagaaccccaggtgtacaccctgccccctagcagggaagagctgaccaagaaccaggtgtccctgacctgtctggtcaagggcttctaccccagcgatatcgccgtggagtgggagagcaacggccagcctgagaacaactacaagaccaccccccctgtgctggacagcgacggcagcttcttcctgtacagcaagctgaccgtggacaagagccggtggcagcagggcaacgtgtttagctgcagcgtgatgcacgaggccctgcacaaccactacacccagaagagcttaagcctgtcccctggcagt

SEQ ID NO: 623 - DNA, 1458 bp, synthetic construct
  misc_feature 1..1458: note = Synthetic
  source 1..1458: mol_type = other DNA
agggttcagcccaccgaatcaatagtacggttcccaaatatcactaatctttgccccttcggggaagtatttaacgctactcgatttgctagcgtatatgcctggaaccggaagagaataagcaactgtgttgcagactatagcgtgctttacaattccgcatcctttagtaccttcaaatgttacggtgtgagccccaccaaactcaatgatctctgtttcacaaacgtgtacgcagatagtttcgttatacgcggggacgaagtacggcagatagcccctggccagacaggaaagatagccgattacaactacaaacttccagacgattttacagggtgtgtgatcgcttggaattcaaataacctggactccaaagtgggaggcaactataattacctgtaccgactgttccgcaaaagcaacttgaaacctttcgagcgagatatatcaaccgaaatctaccaagctggttctacaccttgtaatggtgtggagggatttaactgctacttccctcttcagtcctatggatttcagcctacaaatggagtcgggtatcaaccctatagagtcgtggtgttgtcatttgaacttctccatgcacctgctactgtctgtggtccaaaaaagtccactaatcttgtaaaaaacaaatgcgtgaacttcaatttcaatggcctcaccggaacaggtgttttgacagaatctaacaaaaaattccttcccttccagcaaggatccggcggcggcggtgacggtggtggcggctccggagacaagacccacacctgccccccttgtcctgcccctgagctgctgggcggaccctccgtgtttctgttcccccccaagcccaaggacaccctgatgatcagccggacccccgaggtcacctgcgtggtggtggacgtcagccacgaggacccagaggtcaagttcaattggtatgtggacggcgtggaggtgcacaacgccaagaccaagccccgggaggaacagtacaacagcacctaccgggtggtgtccgtgctgaccgtgctgcaccaggactggctgaacggcaaagaatacaagtgcaaggtgtccaacaaggccctgcctgcccccatcgagaaaaccatcagcaaggccaagggccagcccagagaaccccaggtgtacaccctgccccctagcagggaagagctgaccaagaaccaggtgtccctgacctgtctggtcaagggcttctaccccagcgatatcgccgtggagtgggagagcaacggccagcctgagaacaactacaagaccaccccccctgtgctggacagcgacggcagcttcttcctgtacagcaagctgaccgtggacaagagccggtggcagcagggcaacgtgtttagctgcagcgtgatgcacgaggccctgcacaaccactacacccagaagagcttaagcctgtcccctggcagt

SEQ ID NO: 624 - DNA, 1455 bp, synthetic construct
  misc_feature 1..1455: note = Synthetic
  source 1..1455: mol_type = other DNA
agggttcagcccaccgaatcaatagtacggttcccaaatatcactaatctttgccccttcggggaagtatttaacgctactcgatttgctagcgtatatgcctggaaccggaagagaataagcaactgtgttgcagactatagcgtgctttacaattccgcatcctttagtaccttcaaatgttacggtgtgagccccaccaaactcaatgatctctgtttcacaaacgtgtacgcagatagtttcgttatacgcggggacgaagtacggcagatagcccctggccagacaggaaagatagccgattacaactacaaacttccagacgattttacagggtgtgtgatcgcttggaattcaaataacctggactccaaagtgggaggcaactataattacctgtaccgactgttccgcaaaagcaacttgaaacctttcgagcgagatatatcaaccgaaatctaccaagctggttctacaccttgtaatggtgtggagggatttaactgctacttccctcttcagtcctatggatttcagcctacaaatggagtcgggtatcaaccctatagagtcgtggtgttgtcatttgaacttctccatgcacctgctactgtctgtggtccaaaaaagtccactaatcttgtaaaaaacaaatgcgtgaacttcaatttcaatggcctcaccggaacaggtgttttgacagaatctaacaaaaaattccttcccttccagggatccggcggcggcggtgacggtggtggcggctccggagacaagacccacacctgccccccttgtcctgcccctgagctgctgggcggaccctccgtgtttctgttcccccccaagcccaaggacaccctgatgatcagccggacccccgaggtcacctgcgtggtggtggacgtcagccacgaggacccagaggtcaagttcaattggtatgtggacggcgtggaggtgcacaacgccaagaccaagccccgggaggaacagtacaacagcacctaccgggtggtgtccgtgctgaccgtgctgcaccaggactggctgaacggcaaagaatacaagtgcaaggtgtccaacaaggccctgcctgcccccatcgagaaaaccatcagcaaggccaagggccagcccagagaaccccaggtgtacaccctgccccctagcagggaagagctgaccaagaaccaggtgtccctgacctgtctggtcaagggcttctaccccagcgatatcgccgtggagtgggagagcaacggccagcctgagaacaactacaagaccaccccccctgtgctggacagcgacggcagcttcttcctgtacagcaagctgaccgtggacaagagccggtggcagcagggcaacgtgtttagctgcagcgtgatgcacgaggccctgcacaaccactacacccagaagagcttaagcctgtcccctggcagt

SEQ ID NO: 625 - DNA, 1452 bp, synthetic construct
  misc_feature 1..1452: note = Synthetic
  source 1..1452: mol_type = other DNA
agggttcagcccaccgaatcaatagtacggttcccaaatatcactaatctttgccccttcggggaagtatttaacgctactcgatttgctagcgtatatgcctggaaccggaagagaataagcaactgtgttgcagactatagcgtgctttacaattccgcatcctttagtaccttcaaatgttacggtgtgagccccaccaaactcaatgatctctgtttcacaaacgtgtacgcagatagtttcgttatacgcggggacgaagtacggcagatagcccctggccagacaggaaagatagccgattacaactacaaacttccagacgattttacagggtgtgtgatcgcttggaattcaaataacctggactccaaagtgggaggcaactataattacctgtaccgactgttccgcaaaagcaacttgaaacctttcgagcgagatatatcaaccgaaatctaccaagctggttctacaccttgtaatggtgtggagggatttaactgctacttccctcttcagtcctatggatttcagcctacaaatggagtcgggtatcaaccctatagagtcgtggtgttgtcatttgaacttctccatgcacctgctactgtctgtggtccaaaaaagtccactaatcttgtaaaaaacaaatgcgtgaacttcaatttcaatggcctcaccggaacaggtgttttgacagaatctaacaaaaaattccttcccttcggatccggcggcggcggtgacggtggtggcggctccggagacaagacccacacctgccccccttgtcctgcccctgagctgctgggcggaccctccgtgtttctgttcccccccaagcccaaggacaccctgatgatcagccggacccccgaggtcacctgcgtggtggtggacgtcagccacgaggacccagaggtcaagttcaattggtatgtggacggcgtggaggtgcacaacgccaagaccaagccccgggaggaacagtacaacagcacctaccgggtggtgtccgtgctgaccgtgctgcaccaggactggctgaacggcaaagaatacaagtgcaaggtgtccaacaaggccctgcctgcccccatcgagaaaaccatcagcaaggccaagggccagcccagagaaccccaggtgtacaccctgccccctagcagggaagagctgaccaagaaccaggtgtccctgacctgtctggtcaagggcttctaccccagcgatatcgccgtggagtgggagagcaacggccagcctgagaacaactacaagaccaccccccctgtgctggacagcgacggcagcttcttcctgtacagcaagctgaccgtggacaagagccggtggcagcagggcaacgtgtttagctgcagcgtgatgcacgaggccctgcacaaccactacacccagaagagcttaagcctgtcccctggcagt

SEQ ID NO: 626 - DNA, 1449 bp, synthetic construct
  misc_feature 1..1449: note = Synthetic
  source 1..1449: mol_type = other DNA
agggttcagcccaccgaatcaatagtacggttcccaaatatcactaatctttgccccttcggggaagtatttaacgctactcgatttgctagcgtatatgcctggaaccggaagagaataagcaactgtgttgcagactatagcgtgctttacaattccgcatcctttagtaccttcaaatgttacggtgtgagccccaccaaactcaatgatctctgtttcacaaacgtgtacgcagatagtttcgttatacgcggggacgaagtacggcagatagcccctggccagacaggaaagatagccgattacaactacaaacttccagacgattttacagggtgtgtgatcgcttggaattcaaataacctggactccaaagtgggaggcaactataattacctgtaccgactgttccgcaaaagcaacttgaaacctttcgagcgagatatatcaaccgaaatctaccaagctggttctacaccttgtaatggtgtggagggatttaactgctacttccctcttcagtcctatggatttcagcctacaaatggagtcgggtatcaaccctatagagtcgtggtgttgtcatttgaacttctccatgcacctgctactgtctgtggtccaaaaaagtccactaatcttgtaaaaaacaaatgcgtgaacttcaatttcaatggcctcaccggaacaggtgttttgacagaatctaacaaaaaattccttcccggatccggcggcggcggtgacggtggtggcggctccggagacaagacccacacctgccccccttgtcctgcccctgagctgctgggcggaccctccgtgtttctgttcccccccaagcccaaggacaccctgatgatcagccggacccccgaggtcacctgcgtggtggtggacgtcagccacgaggacccagaggtcaagttcaattggtatgtggacggcgtggaggtgcacaacgccaagaccaagccccgggaggaacagtacaacagcacctaccgggtggtgtccgtgctgaccgtgctgcaccaggactggctgaacggcaaagaatacaagtgcaaggtgtccaacaaggccctgcctgcccccatcgagaaaaccatcagcaaggccaagggccagcccagagaaccccaggtgtacaccctgccccctagcagggaagagctgaccaagaaccaggtgtccctgacctgtctggtcaagggcttctaccccagcgatatcgccgtggagtgggagagcaacggccagcctgagaacaactacaagaccaccccccctgtgctggacagcgacggcagcttcttcctgtacagcaagctgaccgtggacaagagccggtggcagcagggcaacgtgtttagctgcagcgtgatgcacgaggccctgcacaaccactacacccagaagagcttaagcctgtcccctggcagt

SEQ ID NO: 627 - DNA, 1446 bp, synthetic construct
  misc_feature 1..1446: note = Synthetic
  source 1..1446: mol_type = other DNA
agggttcagcccaccgaatcaatagtacggttcccaaatatcactaatctttgccccttcggggaagtatttaacgctactcgatttgctagcgtatatgcctggaaccggaagagaataagcaactgtgttgcagactatagcgtgctttacaattccgcatcctttagtaccttcaaatgttacggtgtgagccccaccaaactcaatgatctctgtttcacaaacgtgtacgcagatagtttcgttatacgcggggacgaagtacggcagatagcccctggccagacaggaaagatagccgattacaactacaaacttccagacgattttacagggtgtgtgatcgcttggaattcaaataacctggactccaaagtgggaggcaactataattacctgtaccgactgttccgcaaaagcaacttgaaacctttcgagcgagatatatcaaccgaaatctaccaagctggttctacaccttgtaatggtgtggagggatttaactgctacttccctcttcagtcctatggatttcagcctacaaatggagtcgggtatcaaccctatagagtcgtggtgttgtcatttgaacttctccatgcacctgctactgtctgtggtccaaaaaagtccactaatcttgtaaaaaacaaatgcgtgaacttcaatttcaatggcctcaccggaacaggtgttttgacagaatctaacaaaaaattccttggatccggcggcggcggtgacggtggtggcggctccggagacaagacccacacctgccccccttgtcctgcccctgagctgctgggcggaccctccgtgtttctgttcccccccaagcccaaggacaccctgatgatcagccggacccccgaggtcacctgcgtggtggtggacgtcagccacgaggacccagaggtcaagttcaattggtatgtggacggcgtggaggtgcacaacgccaagaccaagccccgggaggaacagtacaacagcacctaccgggtggtgtccgtgctgaccgtgctgcaccaggactggctgaacggcaaagaatacaagtgcaaggtgtccaacaaggccctgcctgcccccatcgagaaaaccatcagcaaggccaagggccagcccagagaaccccaggtgtacaccctgccccctagcagggaagagctgaccaagaaccaggtgtccctgacctgtctggtcaagggcttctaccccagcgatatcgccgtggagtgggagagcaacggccagcctgagaacaactacaagaccaccccccctgtgctggacagcgacggcagcttcttcctgtacagcaagctgaccgtggacaagagccggtggcagcagggcaacgtgtttagctgcagcgtgatgcacgaggccctgcacaaccactacacccagaagagcttaagcctgtcccctggcagt

SEQ ID NO: 628 - DNA, 1443 bp, synthetic construct
  misc_feature 1..1443: note = Synthetic
  source 1..1443: mol_type = other DNA
agggttcagcccaccgaatcaatagtacggttcccaaatatcactaatctttgccccttcggggaagtatttaacgctactcgatttgctagcgtatatgcctggaaccggaagagaataagcaactgtgttgcagactatagcgtgctttacaattccgcatcctttagtaccttcaaatgttacggtgtgagccccaccaaactcaatgatctctgtttcacaaacgtgtacgcagatagtttcgttatacgcggggacgaagtacggcagatagcccctggccagacaggaaagatagccgattacaactacaaacttccagacgattttacagggtgtgtgatcgcttggaattcaaataacctggactccaaagtgggaggcaactataattacctgtaccgactgttccgcaaaagcaacttgaaacctttcgagcgagatatatcaaccgaaatctaccaagctggttctacaccttgtaatggtgtggagggatttaactgctacttccctcttcagtcctatggatttcagcctacaaatggagtcgggtatcaaccctatagagtcgtggtgttgtcatttgaacttctccatgcacctgctactgtctgtggtccaaaaaagtccactaatcttgtaaaaaacaaatgcgtgaacttcaatttcaatggcctcaccggaacaggtgttttgacagaatctaacaaaaaattcggatccggcggcggcggtgacggtggtggcggctccggagacaagacccacacctgccccccttgtcctgcccctgagctgctgggcggaccctccgtgtttctgttcccccccaagcccaaggacaccctgatgatcagccggacccccgaggtcacctgcgtggtggtggacgtcagccacgaggacccagaggtcaagttcaattggtatgtggacggcgtggaggtgcacaacgccaagaccaagccccgggaggaacagtacaacagcacctaccgggtggtgtccgtgctgaccgtgctgcaccaggactggctgaacggcaaagaatacaagtgcaaggtgtccaacaaggccctgcctgcccccatcgagaaaaccatcagcaaggccaagggccagcccagagaaccccaggtgtacaccctgccccctagcagggaagagctgaccaagaaccaggtgtccctgacctgtctggtcaagggcttctaccccagcgatatcgccgtggagtgggagagcaacggccagcctgagaacaactacaagaccaccccccctgtgctggacagcgacggcagcttcttcctgtacagcaagctgaccgtggacaagagccggtggcagcagggcaacgtgtttagctgcagcgtgatgcacgaggccctgcacaaccactacacccagaagagcttaagcctgtcccctggcagt

SEQ ID NO: 629 - DNA, 1440 bp, synthetic construct
  misc_feature 1..1440: note = Synthetic
  source 1..1440: mol_type = other DNA
agggttcagcccaccgaatcaatagtacggttcccaaatatcactaatctttgccccttcggggaagtatttaacgctactcgatttgctagcgtatatgcctggaaccggaagagaataagcaactgtgttgcagactatagcgtgctttacaattccgcatcctttagtaccttcaaatgttacggtgtgagccccaccaaactcaatgatctctgtttcacaaacgtgtacgcagatagtttcgttatacgcggggacgaagtacggcagatagcccctggccagacaggaaagatagccgattacaactacaaacttccagacgattttacagggtgtgtgatcgcttggaattcaaataacctggactccaaagtgggaggcaactataattacctgtaccgactgttccgcaaaagcaacttgaaacctttcgagcgagatatatcaaccgaaatctaccaagctggttctacaccttgtaatggtgtggagggatttaactgctacttccctcttcagtcctatggatttcagcctacaaatggagtcgggtatcaaccctatagagtcgtggtgttgtcatttgaacttctccatgcacctgctactgtctgtggtccaaaaaagtccactaatcttgtaaaaaacaaatgcgtgaacttcaatttcaatggcctcaccggaacaggtgttttgacagaatctaacaaaaaaggatccggcggcggcggtgacggtggtggcggctccggagacaagacccacacctgccccccttgtcctgcccctgagctgctgggcggaccctccgtgtttctgttcccccccaagcccaaggacaccctgatgatcagccggacccccgaggtcacctgcgtggtggtggacgtcagccacgaggacccagaggtcaagttcaattggtatgtggacggcgtggaggtgcacaacgccaagaccaagccccgggaggaacagtacaacagcacctaccgggtggtgtccgtgctgaccgtgctgcaccaggactggctgaacggcaaagaatacaagtgcaaggtgtccaacaaggccctgcctgcccccatcgagaaaaccatcagcaaggccaagggccagcccagagaaccccaggtgtacaccctgccccctagcagggaagagctgaccaagaaccaggtgtccctgacctgtctggtcaagggcttctaccccagcgatatcgccgtggagtgggagagcaacggccagcctgagaacaactacaagaccaccccccctgtgctggacagcgacggcagcttcttcctgtacagcaagctgaccgtggacaagagccggtggcagcagggcaacgtgtttagctgcagcgtgatgcacgaggccctgcacaaccactacacccagaagagcttaagcctgtcccctggcagt

SEQ ID NO: 630 - DNA, 1437 bp, synthetic construct
  misc_feature 1..1437: note = Synthetic
  source 1..1437: mol_type = other DNA
agggttcagcccaccgaatcaatagtacggttcccaaatatcactaatctttgccccttcggggaagtatttaacgctactcgatttgctagcgtatatgcctggaaccggaagagaataagcaactgtgttgcagactatagcgtgctttacaattccgcatcctttagtaccttcaaatgttacggtgtgagccccaccaaactcaatgatctctgtttcacaaacgtgtacgcagatagtttcgttatacgcggggacgaagtacggcagatagcccctggccagacaggaaagatagccgattacaactacaaacttccagacgattttacagggtgtgtgatcgcttggaattcaaataacctggactccaaagtgggaggcaactataattacctgtaccgactgttccgcaaaagcaacttgaaacctttcgagcgagatatatcaaccgaaatctaccaagctggttctacaccttgtaatggtgtggagggatttaactgctacttccctcttcagtcctatggatttcagcctacaaatggagtcgggtatcaaccctatagagtcgtggtgttgtcatttgaacttctccatgcacctgctactgtctgtggtccaaaaaagtccactaatcttgtaaaaaacaaatgcgtgaacttcaatttcaatggcctcaccggaacaggtgttttgacagaatctaacaaaggatccggcggcggcggtgacggtggtggcggctccggagacaagacccacacctgccccccttgtcctgcccctgagctgctgggcggaccctccgtgtttctgttcccccccaagcccaaggacaccctgatgatcagccggacccccgaggtcacctgcgtggtggtggacgtcagccacgaggacccagaggtcaagttcaattggtatgtggacggcgtggaggtgcacaacgccaagaccaagccccgggaggaacagtacaacagcacctaccgggtggtgtccgtgctgaccgtgctgcaccaggactggctgaacggcaaagaatacaagtgcaaggtgtccaacaaggccctgcctgcccccatcgagaaaaccatcagcaaggccaagggccagcccagagaaccccaggtgtacaccctgccccctagcagggaagagctgaccaagaaccaggtgtccctgacctgtctggtcaagggcttctaccccagcgatatcgccgtggagtgggagagcaacggccagcctgagaacaactacaagaccaccccccctgtgctggacagcgacggcagcttcttcctgtacagcaagctgaccgtggacaagagccggtggcagcagggcaacgtgtttagctgcagcgtgatgcacgaggccctgcacaaccactacacccagaagagcttaagcctgtcccctggcagt

SEQ ID NO: 631 - DNA, 1434 bp, synthetic construct
  misc_feature 1..1434: note = Synthetic
  source 1..1434: mol_type = other DNA
agggttcagcccaccgaatcaatagtacggttcccaaatatcactaatctttgccccttcggggaagtatttaacgctactcgatttgctagcgtatatgcctggaaccggaagagaataagcaactgtgttgcagactatagcgtgctttacaattccgcatcctttagtaccttcaaatgttacggtgtgagccccaccaaactcaatgatctctgtttcacaaacgtgtacgcagatagtttcgttatacgcggggacgaagtacggcagatagcccctggccagacaggaaagatagccgattacaactacaaacttccagacgattttacagggtgtgtgatcgcttggaattcaaataacctggactccaaagtgggaggcaactataattacctgtaccgactgttccgcaaaagcaacttgaaacctttcgagcgagatatatcaaccgaaatctaccaagctggttctacaccttgtaatggtgtggagggatttaactgctacttccctcttcagtcctatggatttcagcctacaaatggagtcgggtatcaaccctatagagtcgtggtgttgtcatttgaacttctccatgcacctgctactgtctgtggtccaaaaaagtccactaatcttgtaaaaaacaaatgcgtgaacttcaatttcaatggcctcaccggaacaggtgttttgacagaatctaacggatccggcggcggcggtgacggtggtggcggctccggagacaagacccacacctgccccccttgtcctgcccctgagctgctgggcggaccctccgtgtttctgttcccccccaagcccaaggacaccctgatgatcagccggacccccgaggtcacctgcgtggtggtggacgtcagccacgaggacccagaggtcaagttcaattggtatgtggacggcgtggaggtgcacaacgccaagaccaagccccgggaggaacagtacaacagcacctaccgggtggtgtccgtgctgaccgtgctgcaccaggactggctgaacggcaaagaatacaagtgcaaggtgtccaacaaggccctgcctgcccccatcgagaaaaccatcagcaaggccaagggccagcccagagaaccccaggtgtacaccctgccccctagcagggaagagctgaccaagaaccaggtgtccctgacctgtctggtcaagggcttctaccccagcgatatcgccgtggagtgggagagcaacggccagcctgagaacaactacaagaccaccccccctgtgctggacagcgacggcagcttcttcctgtacagcaagctgaccgtggacaagagccggtggcagcagggcaacgtgtttagctgcagcgtgatgcacgaggccctgcacaaccactacacccagaagagcttaagcctgtcccctggcagt

SEQ ID NO: 632 - DNA, 1431 bp, synthetic construct
  misc_feature 1..1431: note = Synthetic
  source 1..1431: mol_type = other DNA
agggttcagcccaccgaatcaatagtacggttcccaaatatcactaatctttgccccttcggggaagtatttaacgctactcgatttgctagcgtatatgcctggaaccggaagagaataagcaactgtgttgcagactatagcgtgctttacaattccgcatcctttagtaccttcaaatgttacggtgtgagccccaccaaactcaatgatctctgtttcacaaacgtgtacgcagatagtttcgttatacgcggggacgaagtacggcagatagcccctggccagacaggaaagatagccgattacaactacaaacttccagacgattttacagggtgtgtgatcgcttggaattcaaataacctggactccaaagtgggaggcaactataattacctgtaccgactgttccgcaaaagcaacttgaaacctttcgagcgagatatatcaaccgaaatctaccaagctggttctacaccttgtaatggtgtggagggatttaactgctacttccctcttcagtcctatggatttcagcctacaaatggagtcgggtatcaaccctatagagtcgtggtgttgtcatttgaacttctccatgcacctgctactgtctgtggtccaaaaaagtccactaatcttgtaaaaaacaaatgcgtgaacttcaatttcaatggcctcaccggaacaggtgttttgacagaatctggatccggcggcggcggtgacggtggtggcggctccggagacaagacccacacctgccccccttgtcctgcccctgagctgctgggcggaccctccgtgtttctgttcccccccaagcccaaggacaccctgatgatcagccggacccccgaggtcacctgcgtggtggtggacgtcagccacgaggacccagaggtcaagttcaattggtatgtggacggcgtggaggtgcacaacgccaagaccaagccccgggaggaacagtacaacagcacctaccgggtggtgtccgtgctgaccgtgctgcaccaggactggctgaacggcaaagaatacaagtgcaaggtgtccaacaaggccctgcctgcccccatcgagaaaaccatcagcaaggccaagggccagcccagagaaccccaggtgtacaccctgccccctagcagggaagagctgaccaagaaccaggtgtccctgacctgtctggtcaagggcttctaccccagcgatatcgccgtggagtgggagagcaacggccagcctgagaacaactacaagaccaccccccctgtgctggacagcgacggcagcttcttcctgtacagcaagctgaccgtggacaagagccggtggcagcagggcaacgtgtttagctgcagcgtgatgcacgaggccctgcacaaccactacacccagaagagcttaagcctgtcccctggcagt

SEQ ID NO: 633 - DNA, 1428 bp, synthetic construct
  misc_feature 1..1428: note = Synthetic
  source 1..1428: mol_type = other DNA
agggttcagcccaccgaatcaatagtacggttcccaaatatcactaatctttgccccttcggggaagtatttaacgctactcgatttgctagcgtatatgcctggaaccggaagagaataagcaactgtgttgcagactatagcgtgctttacaattccgcatcctttagtaccttcaaatgttacggtgtgagccccaccaaactcaatgatctctgtttcacaaacgtgtacgcagatagtttcgttatacgcggggacgaagtacggcagatagcccctggccagacaggaaagatagccgattacaactacaaacttccagacgattttacagggtgtgtgatcgcttggaattcaaataacctggactccaaagtgggaggcaactataattacctgtaccgactgttccgcaaaagcaacttgaaacctttcgagcgagatatatcaaccgaaatctaccaagctggttctacaccttgtaatggtgtggagggatttaactgctacttccctcttcagtcctatggatttcagcctacaaatggagtcgggtatcaaccctatagagtcgtggtgttgtcatttgaacttctccatgcacctgctactgtctgtggtccaaaaaagtccactaatcttgtaaaaaacaaatgcgtgaacttcaatttcaatggcctcaccggaacaggtgttttgacagaaggatccggcggcggcggtgacggtggtggcggctccggagacaagacccacacctgccccccttgtcctgcccctgagctgctgggcggaccctccgtgtttctgttcccccccaagcccaaggacaccctgatgatcagccggacccccgaggtcacctgcgtggtggtggacgtcagccacgaggacccagaggtcaagttcaattggtatgtggacggcgtggaggtgcacaacgccaagaccaagccccgggaggaacagtacaacagcacctaccgggtggtgtccgtgctgaccgtgctgcaccaggactggctgaacggcaaagaatacaagtgcaaggtgtccaacaaggccctgcctgcccccatcgagaaaaccatcagcaaggccaagggccagcccagagaaccccaggtgtacaccctgccccctagcagggaagagctgaccaagaaccaggtgtccctgacctgtctggtcaagggcttctaccccagcgatatcgccgtggagtgggagagcaacggccagcctgagaacaactacaagaccaccccccctgtgctggacagcgacggcagcttcttcctgtacagcaagctgaccgtggacaagagccggtggcagcagggcaacgtgtttagctgcagcgtgatgcacgaggccctgcacaaccactacacccagaagagcttaagcctgtcccctggcagt

SEQ ID NO: 634 - DNA, 1425 bp, synthetic construct
  misc_feature 1..1425: note = Synthetic
  source 1..1425: mol_type = other DNA
agggttcagcccaccgaatcaatagtacggttcccaaatatcactaatctttgccccttcggggaagtatttaacgctactcgatttgctagcgtatatgcctggaaccggaagagaataagcaactgtgttgcagactatagcgtgctttacaattccgcatcctttagtaccttcaaatgttacggtgtgagccccaccaaactcaatgatctctgtttcacaaacgtgtacgcagatagtttcgttatacgcggggacgaagtacggcagatagcccctggccagacaggaaagatagccgattacaactacaaacttccagacgattttacagggtgtgtgatcgcttggaattcaaataacctggactccaaagtgggaggcaactataattacctgtaccgactgttccgcaaaagcaacttgaaacctttcgagcgagatatatcaaccgaaatctaccaagctggttctacaccttgtaatggtgtggagggatttaactgctacttccctcttcagtcctatggatttcagcctacaaatggagtcgggtatcaaccctatagagtcgtggtgttgtcatttgaacttctccatgcacctgctactgtctgtggtccaaaaaagtccactaatcttgtaaaaaacaaatgcgtgaacttcaatttcaatggcctcaccggaacaggtgttttgacaggatccggcggcggcggtgacggtggtggcggctccggagacaagacccacacctgccccccttgtcctgcccctgagctgctgggcggaccctccgtgtttctgttcccccccaagcccaaggacaccctgatgatcagccggacccccgaggtcacctgcgtggtggtggacgtcagccacgaggacccagaggtcaagttcaattggtatgtggacggcgtggaggtgcacaacgccaagaccaagccccgggaggaacagtacaacagcacctaccgggtggtgtccgtgctgaccgtgctgcaccaggactggctgaacggcaaagaatacaagtgcaaggtgtccaacaaggccctgcctgcccccatcgagaaaaccatcagcaaggccaagggccagcccagagaaccccaggtgtacaccctgccccctagcagggaagagctgaccaagaaccaggtgtccctgacctgtctggtcaagggcttctaccccagcgatatcgccgtggagtgggagagcaacggccagcctgagaacaactacaagaccaccccccctgtgctggacagcgacggcagcttcttcctgtacagcaagctgaccgtggacaagagccggtggcagcagggcaacgtgtttagctgcagcgtgatgcacgaggccctgcacaaccactacacccagaagagcttaagcctgtcccctggcagt

SEQ ID NO: 635 - DNA, 1422 bp, synthetic construct
  misc_feature 1..1422: note = Synthetic
  source 1..1422: mol_type = other DNA
agggttcagcccaccgaatcaatagtacggttcccaaatatcactaatctttgccccttcggggaagtatttaacgctactcgatttgctagcgtatatgcctggaaccggaagagaataagcaactgtgttgcagactatagcgtgctttacaattccgcatcctttagtaccttcaaatgttacggtgtgagccccaccaaactcaatgatctctgtttcacaaacgtgtacgcagatagtttcgttatacgcggggacgaagtacggcagatagcccctggccagacaggaaagatagccgattacaactacaaacttccagacgattttacagggtgtgtgatcgcttggaattcaaataacctggactccaaagtgggaggcaactataattacctgtaccgactgttccgcaaaagcaacttgaaacctttcgagcgagatatatcaaccgaaatctaccaagctggttctacaccttgtaatggtgtggagggatttaactgctacttccctcttcagtcctatggatttcagcctacaaatggagtcgggtatcaaccctatagagtcgtggtgttgtcatttgaacttctccatgcacctgctactgtctgtggtccaaaaaagtccactaatcttgtaaaaaacaaatgcgtgaacttcaatttcaatggcctcaccggaacaggtgttttgggatccggcggcggcggtgacggtggtggcggctccggagacaagacccacacctgccccccttgtcctgcccctgagctgctgggcggaccctccgtgtttctgttcccccccaagcccaaggacaccctgatgatcagccggacccccgaggtcacctgcgtggtggtggacgtcagccacgaggacccagaggtcaagttcaattggtatgtggacggcgtggaggtgcacaacgccaagaccaagccccgggaggaacagtacaacagcacctaccgggtggtgtccgtgctgaccgtgctgcaccaggactggctgaacggcaaagaatacaagtgcaaggtgtccaacaaggccctgcctgcccccatcgagaaaaccatcagcaaggccaagggccagcccagagaaccccaggtgtacaccctgccccctagcagggaagagctgaccaagaaccaggtgtccctgacctgtctggtcaagggcttctaccccagcgatatcgccgtggagtgggagagcaacggccagcctgagaacaactacaagaccaccccccctgtgctggacagcgacggcagcttcttcctgtacagcaagctgaccgtggacaagagccggtggcagcagggcaacgtgtttagctgcagcgtgatgcacgaggccctgcacaaccactacacccagaagagcttaagcctgtcccctggcagt

SEQ ID NO: 636 - DNA, 1419 bp, synthetic construct
  misc_feature 1..1419: note = Synthetic
  source 1..1419: mol_type = other DNA
agggttcagcccaccgaatcaatagtacggttcccaaatatcactaatctttgccccttcggggaagtatttaacgctactcgatttgctagcgtatatgcctggaaccggaagagaataagcaactgtgttgcagactatagcgtgctttacaattccgcatcctttagtaccttcaaatgttacggtgtgagccccaccaaactcaatgatctctgtttcacaaacgtgtacgcagatagtttcgttatacgcggggacgaagtacggcagatagcccctggccagacaggaaagatagccgattacaactacaaacttccagacgattttacagggtgtgtgatcgcttggaattcaaataacctggactccaaagtgggaggcaactataattacctgtaccgactgttccgcaaaagcaacttgaaacctttcgagcgagatatatcaaccgaaatctaccaagctggttctacaccttgtaatggtgtggagggatttaactgctacttccctcttcagtcctatggatttcagcctacaaatggagtcgggtatcaaccctatagagtcgtggtgttgtcatttgaacttctccatgcacctgctactgtctgtggtccaaaaaagtccactaatcttgtaaaaaacaaatgcgtgaacttcaatttcaatggcctcaccggaacaggtgttggatccggcggcggcggtgacggtggtggcggctccggagacaagacccacacctgccccccttgtcctgcccctgagctgctgggcggaccctccgtgtttctgttcccccccaagcccaaggacaccctgatgatcagccggacccccgaggtcacctgcgtggtggtggacgtcagccacgaggacccagaggtcaagttcaattggtatgtggacggcgtggaggtgcacaacgccaagaccaagccccgggaggaacagtacaacagcacctaccgggtggtgtccgtgctgaccgtgctgcaccaggactggctgaacggcaaagaatacaagtgcaaggtgtccaacaaggccctgcctgcccccatcgagaaaaccatcagcaaggccaagggccagcccagagaaccccaggtgtacaccctgccccctagcagggaagagctgaccaagaaccaggtgtccctgacctgtctggtcaagggcttctaccccagcgatatcgccgtggagtgggagagcaacggccagcctgagaacaactacaagaccaccccccctgtgctggacagcgacggcagcttcttcctgtacagcaagctgaccgtggacaagagccggtggcagcagggcaacgtgtttagctgcagcgtgatgcacgaggccctgcacaaccactacacccagaagagcttaagcctgtcccctggcagt

SEQ ID NO: 637 - DNA, 1416 bp, synthetic construct
  misc_feature 1..1416: note = Synthetic
  source 1..1416: mol_type = other DNA
agggttcagcccaccgaatcaatagtacggttcccaaatatcactaatctttgccccttcggggaagtatttaacgctactcgatttgctagcgtatatgcctggaaccggaagagaataagcaactgtgttgcagactatagcgtgctttacaattccgcatcctttagtaccttcaaatgttacggtgtgagccccaccaaactcaatgatctctgtttcacaaacgtgtacgcagatagtttcgttatacgcggggacgaagtacggcagatagcccctggccagacaggaaagatagccgattacaactacaaacttccagacgattttacagggtgtgtgatcgcttggaattcaaataacctggactccaaagtgggaggcaactataattacctgtaccgactgttccgcaaaagcaacttgaaacctttcgagcgagatatatcaaccgaaatctaccaagctggttctacaccttgtaatggtgtggagggatttaactgctacttccctcttcagtcctatggatttcagcctacaaatggagtcgggtatcaaccctatagagtcgtggtgttgtcatttgaacttctccatgcacctgctactgtctgtggtccaaaaaagtccactaatcttgtaaaaaacaaatgcgtgaacttcaatttcaatggcctcaccggaacaggtggatccggcggcggcggtgacggtggtggcggctccggagacaagacccacacctgccccccttgtcctgcccctgagctgctgggcggaccctccgtgtttctgttcccccccaagcccaaggacaccctgatgatcagccggacccccgaggtcacctgcgtggtggtggacgtcagccacgaggacccagaggtcaagttcaattggtatgtggacggcgtggaggtgcacaacgccaagaccaagccccgggaggaacagtacaacagcacctaccgggtggtgtccgtgctgaccgtgctgcaccaggactggctgaacggcaaagaatacaagtgcaaggtgtccaacaaggccctgcctgcccccatcgagaaaaccatcagcaaggccaagggccagcccagagaaccccaggtgtacaccctgccccctagcagggaagagctgaccaagaaccaggtgtccctgacctgtctggtcaagggcttctaccccagcgatatcgccgtggagtgggagagcaacggccagcctgagaacaactacaagaccaccccccctgtgctggacagcgacggcagcttcttcctgtacagcaagctgaccgtggacaagagccggtggcagcagggcaacgtgtttagctgcagcgtgatgcacgaggccctgcacaaccactacacccagaagagcttaagcctgtcccctggcagt

SEQ ID NO: 638 - DNA, 1413 bp, synthetic construct
  misc_feature 1..1413: note = Synthetic
  source 1..1413: mol_type = other DNA
agggttcagcccaccgaatcaatagtacggttcccaaatatcactaatctttgccccttcggggaagtatttaacgctactcgatttgctagcgtatatgcctggaaccggaagagaataagcaactgtgttgcagactatagcgtgctttacaattccgcatcctttagtaccttcaaatgttacggtgtgagccccaccaaactcaatgatctctgtttcacaaacgtgtacgcagatagtttcgttatacgcggggacgaagtacggcagatagcccctggccagacaggaaagatagccgattacaactacaaacttccagacgattttacagggtgtgtgatcgcttggaattcaaataacctggactccaaagtgggaggcaactataattacctgtaccgactgttccgcaaaagcaacttgaaacctttcgagcgagatatatcaaccgaaatctaccaagctggttctacaccttgtaatggtgtggagggatttaactgctacttccctcttcagtcctatggatttcagcctacaaatggagtcgggtatcaaccctatagagtcgtggtgttgtcatttgaacttctccatgcacctgctactgtctgtggtccaaaaaagtccactaatcttgtaaaaaacaaatgcgtgaacttcaatttcaatggcctcaccggaacaggatccggcggcggcggtgacggtggtggcggctccggagacaagacccacacctgccccccttgtcctgcccctgagctgctgggcggaccctccgtgtttctgttcccccccaagcccaaggacaccctgatgatcagccggacccccgaggtcacctgcgtggtggtggacgtcagccacgaggacccagaggtcaagttcaattggtatgtggacggcgtggaggtgcacaacgccaagaccaagccccgggaggaacagtacaacagcacctaccgggtggtgtccgtgctgaccgtgctgcaccaggactggctgaacggcaaagaatacaagtgcaaggtgtccaacaaggccctgcctgcccccatcgagaaaaccatcagcaaggccaagggccagcccagagaaccccaggtgtacaccctgccccctagcagggaagagctgaccaagaaccaggtgtccctgacctgtctggtcaagggcttctaccccagcgatatcgccgtggagtgggagagcaacggccagcctgagaacaactacaagaccaccccccctgtgctggacagcgacggcagcttcttcctgtacagcaagctgaccgtggacaagagccggtggcagcagggcaacgtgtttagctgcagcgtgatgcacgaggccctgcacaaccactacacccagaagagcttaagcctgtcccctggcagt

SEQ ID NO: 639 - DNA, 1410 bp, synthetic construct
  misc_feature 1..1410: note = Synthetic
  source 1..1410: mol_type = other DNA
agggttcagcccaccgaatcaatagtacggttcccaaatatcactaatctttgccccttcggggaagtatttaacgctactcgatttgctagcgtatatgcctggaaccggaagagaataagcaactgtgttgcagactatagcgtgctttacaattccgcatcctttagtaccttcaaatgttacggtgtgagccccaccaaactcaatgatctctgtttcacaaacgtgtacgcagatagtttcgttatacgcggggacgaagtacggcagatagcccctggccagacaggaaagatagccgattacaactacaaacttccagacgattttacagggtgtgtgatcgcttggaattcaaataacctggactccaaagtgggaggcaactataattacctgtaccgactgttccgcaaaagcaacttgaaacctttcgagcgagatatatcaaccgaaatctaccaagctggttctacaccttgtaatggtgtggagggatttaactgctacttccctcttcagtcctatggatttcagcctacaaatggagtcgggtatcaaccctatagagtcgtggtgttgtcatttgaacttctccatgcacctgctactgtctgtggtccaaaaaagtccactaatcttgtaaaaaacaaatgcgtgaacttcaatttcaatggcctcaccggaggatccggcggcggcggtgacggtggtggcggctccggagacaagacccacacctgccccccttgtcctgcccctgagctgctgggcggaccctccgtgtttctgttcccccccaagcccaaggacaccctgatgatcagccggacccccgaggtcacctgcgtggtggtggacgtcagccacgaggacccagaggtcaagttcaattggtatgtggacggcgtggaggtgcacaacgccaagaccaagccccgggaggaacagtacaacagcacctaccgggtggtgtccgtgctgaccgtgctgcaccaggactggctgaacggcaaagaatacaagtgcaaggtgtccaacaaggccctgcctgcccccatcgagaaaaccatcagcaaggccaagggccagcccagagaaccccaggtgtacaccctgccccctagcagggaagagctgaccaagaaccaggtgtccctgacctgtctggtcaagggcttctaccccagcgatatcgccgtggagtgggagagcaacggccagcctgagaacaactacaagaccaccccccctgtgctggacagcgacggcagcttcttcctgtacagcaagctgaccgtggacaagagccggtggcagcagggcaacgtgtttagctgcagcgtgatgcacgaggccctgcacaaccactacacccagaagagcttaagcctgtcccctggcagt

SEQ ID NO: 640 - DNA, 1407 bp, synthetic construct
  misc_feature 1..1407: note = Synthetic
  source 1..1407: mol_type = other DNA
agggttcagcccaccgaatcaatagtacggttcccaaatatcactaatctttgccccttcggggaagtatttaacgctactcgatttgctagcgtatatgcctggaaccggaagagaataagcaactgtgttgcagactatagcgtgctttacaattccgcatcctttagtaccttcaaatgttacggtgtgagccccaccaaactcaatgatctctgtttcacaaacgtgtacgcagatagtttcgttatacgcggggacgaagtacggcagatagcccctggccagacaggaaagatagccgattacaactacaaacttccagacgattttacagggtgtgtgatcgcttggaattcaaataacctggactccaaagtgggaggcaactataattacctgtaccgactgttccgcaaaagcaacttgaaacctttcgagcgagatatatcaaccgaaatctaccaagctggttctacaccttgtaatggtgtggagggatttaactgctacttccctcttcagtcctatggatttcagcctacaaatggagtcgggtatcaaccctatagagtcgtggtgttgtcatttgaacttctccatgcacctgctactgtctgtggtccaaaaaagtccactaatcttgtaaaaaacaaatgcgtgaacttcaatttcaatggcctcaccggatccggcggcggcggtgacggtggtggcggctccggagacaagacccacacctgccccccttgtcctgcccctgagctgctgggcggaccctccgtgtttctgttcccccccaagcccaaggacaccctgatgatcagccggacccccgaggtcacctgcgtggtggtggacgtcagccacgaggacccagaggtcaagttcaattggtatgtggacggcgtggaggtgcacaacgccaagaccaagccccgggaggaacagtacaacagcacctaccgggtggtgtccgtgctgaccgtgctgcaccaggactggctgaacggcaaagaatacaagtgcaaggtgtccaacaaggccctgcctgcccccatcgagaaaaccatcagcaaggccaagggccagcccagagaaccccaggtgtacaccctgccccctagcagggaagagctgaccaagaaccaggtgtccctgacctgtctggtcaagggcttctaccccagcgatatcgccgtggagtgggagagcaacggccagcctgagaacaactacaagaccaccccccctgtgctggacagcgacggcagcttcttcctgtacagcaagctgaccgtggacaagagccggtggcagcagggcaacgtgtttagctgcagcgtgatgcacgaggccctgcacaaccactacacccagaagagcttaagcctgtcccctggcagt

SEQ ID NO: 641 - DNA, 1404 bp, synthetic construct
  misc_feature 1..1404: note = Synthetic
  source 1..1404: mol_type = other DNA
agggttcagcccaccgaatcaatagtacggttcccaaatatcactaatctttgccccttcggggaagtatttaacgctactcgatttgctagcgtatatgcctggaaccggaagagaataagcaactgtgttgcagactatagcgtgctttacaattccgcatcctttagtaccttcaaatgttacggtgtgagccccaccaaactcaatgatctctgtttcacaaacgtgtacgcagatagtttcgttatacgcggggacgaagtacggcagatagcccctggccagacaggaaagatagccgattacaactacaaacttccagacgattttacagggtgtgtgatcgcttggaattcaaataacctggactccaaagtgggaggcaactataattacctgtaccgactgttccgcaaaagcaacttgaaacctttcgagcgagatatatcaaccgaaatctaccaagctggttctacaccttgtaatggtgtggagggatttaactgctacttccctcttcagtcctatggatttcagcctacaaatggagtcgggtatcaaccctatagagtcgtggtgttgtcatttgaacttctccatgcacctgctactgtctgtggtccaaaaaagtccactaatcttgtaaaaaacaaatgcgtgaacttcaatttcaatggcctcggatccggcggcggcggtgacggtggtggcggctccggagacaagacccacacctgccccccttgtcctgcccctgagctgctgggcggaccctccgtgtttctgttcccccccaagcccaaggacaccctgatgatcagccggacccccgaggtcacctgcgtggtggtggacgtcagccacgaggacccagaggtcaagttcaattggtatgtggacggcgtggaggtgcacaacgccaagaccaagccccgggaggaacagtacaacagcacctaccgggtggtgtccgtgctgaccgtgctgcaccaggactggctgaacggcaaagaatacaagtgcaaggtgtccaacaaggccctgcctgcccccatcgagaaaaccatcagcaaggccaagggccagcccagagaaccccaggtgtacaccctgccccctagcagggaagagctgaccaagaaccaggtgtccctgacctgtctggtcaagggcttctaccccagcgatatcgccgtggagtgggagagcaacggccagcctgagaacaactacaagaccaccccccctgtgctggacagcgacggcagcttcttcctgtacagcaagctgaccgtggacaagagccggtggcagcagggcaacgtgtttagctgcagcgtgatgcacgaggccctgcacaaccactacacccagaagagcttaagcctgtcccctggcagt

SEQ ID NO: 642 - DNA, 1401 bp, synthetic construct
  misc_feature 1..1401: note = Synthetic
  source 1..1401: mol_type = other DNA
agggttcagcccaccgaatcaatagtacggttcccaaatatcactaatctttgccccttcggggaagtatttaacgctactcgatttgctagcgtatatgcctggaaccggaagagaataagcaactgtgttgcagactatagcgtgctttacaattccgcatcctttagtaccttcaaatgttacggtgtgagccccaccaaactcaatgatctctgtttcacaaacgtgtacgcagatagtttcgttatacgcggggacgaagtacggcagatagcccctggccagacaggaaagatagccgattacaactacaaacttccagacgattttacagggtgtgtgatcgcttggaattcaaataacctggactccaaagtgggaggcaactataattacctgtaccgactgttccgcaaaagcaacttgaaacctttcgagcgagatatatcaaccgaaatctaccaagctggttctacaccttgtaatggtgtggagggatttaactgctacttccctcttcagtcctatggatttcagcctacaaatggagtcgggtatcaaccctatagagtcgtggtgttgtcatttgaacttctccatgcacctgctactgtctgtggtccaaaaaagtccactaatcttgtaaaaaacaaatgcgtgaacttcaatttcaatggcggatccggcggcggcggtgacggtggtggcggctccggagacaagacccacacctgccccccttgtcctgcccctgagctgctgggcggaccctccgtgtttctgttcccccccaagcccaaggacaccctgatgatcagccggacccccgaggtcacctgcgtggtggtggacgtcagccacgaggacccagaggtcaagttcaattggtatgtggacggcgtggaggtgcacaacgccaagaccaagccccgggaggaacagtacaacagcacctaccgggtggtgtccgtgctgaccgtgctgcaccaggactggctgaacggcaaagaatacaagtgcaaggtgtccaacaaggccctgcctgcccccatcgagaaaaccatcagcaaggccaagggccagcccagagaaccccaggtgtacaccctgccccctagcagggaagagctgaccaagaaccaggtgtccctgacctgtctggtcaagggcttctaccccagcgatatcgccgtggagtgggagagcaacggccagcctgagaacaactacaagaccaccccccctgtgctggacagcgacggcagcttcttcctgtacagcaagctgaccgtggacaagagccggtggcagcagggcaacgtgtttagctgcagcgtgatgcacgaggccctgcacaaccactacacccagaagagcttaagcctgtcccctggcagt

SEQ ID NO: 643 - DNA, 1398 bp, synthetic construct
  misc_feature 1..1398: note = Synthetic
  source 1..1398: mol_type = other DNA
agggttcagcccaccgaatcaatagtacggttcccaaatatcactaatctttgccccttcggggaagtatttaacgctactcgatttgctagcgtatatgcctggaaccggaagagaataagcaactgtgttgcagactatagcgtgctttacaattccgcatcctttagtaccttcaaatgttacggtgtgagccccaccaaactcaatgatctctgtttcacaaacgtgtacgcagatagtttcgttatacgcggggacgaagtacggcagatagcccctggccagacaggaaagatagccgattacaactacaaacttccagacgattttacagggtgtgtgatcgcttggaattcaaataacctggactccaaagtgggaggcaactataattacctgtaccgactgttccgcaaaagcaacttgaaacctttcgagcgagatatatcaaccgaaatctaccaagctggttctacaccttgtaatggtgtggagggatttaactgctacttccctcttcagtcctatggatttcagcctacaaatggagtcgggtatcaaccctatagagtcgtggtgttgtcatttgaacttctccatgcacctgctactgtctgtggtccaaaaaagtccactaatcttgtaaaaaacaaatgcgtgaacttcaatttcaatggatccggcggcggcggtgacggtggtggcggctccggagacaagacccacacctgccccccttgtcctgcccctgagctgctgggcggaccctccgtgtttctgttcccccccaagcccaaggacaccctgatgatcagccggacccccgaggtcacctgcgtggtggtggacgtcagccacgaggacccagaggtcaagttcaattggtatgtggacggcgtggaggtgcacaacgccaagaccaagccccgggaggaacagtacaacagcacctaccgggtggtgtccgtgctgaccgtgctgcaccaggactggctgaacggcaaagaatacaagtgcaaggtgtccaacaaggccctgcctgcccccatcgagaaaaccatcagcaaggccaagggccagcccagagaaccccaggtgtacaccctgccccctagcagggaagagctgaccaagaaccaggtgtccctgacctgtctggtcaagggcttctaccccagcgatatcgccgtggagtgggagagcaacggccagcctgagaacaactacaagaccaccccccctgtgctggacagcgacggcagcttcttcctgtacagcaagctgaccgtggacaagagccggtggcagcagggcaacgtgtttagctgcagcgtgatgcacgaggccctgcacaaccactacacccagaagagcttaagcctgtcccctggcagt

SEQ ID NO: 644 - DNA, 1395 bp, synthetic construct
  misc_feature 1..1395: note = Synthetic
  source 1..1395: mol_type = other DNA
agggttcagcccaccgaatcaatagtacggttcccaaatatcactaatctttgccccttcggggaagtatttaacgctactcgatttgctagcgtatatgcctggaaccggaagagaataagcaactgtgttgcagactatagcgtgctttacaattccgcatcctttagtaccttcaaatgttacggtgtgagccccaccaaactcaatgatctctgtttcacaaacgtgtacgcagatagtttcgttatacgcggggacgaagtacggcagatagcccctggccagacaggaaagatagccgattacaactacaaacttccagacgattttacagggtgtgtgatcgcttggaattcaaataacctggactccaaagtgggaggcaactataattacctgtaccgactgttccgcaaaagcaacttgaaacctttcgagcgagatatatcaaccgaaatctaccaagctggttctacaccttgtaatggtgtggagggatttaactgctacttccctcttcagtcctatggatttcagcctacaaatggagtcgggtatcaaccctatagagtcgtggtgttgtcatttgaacttctccatgcacctgctactgtctgtggtccaaaaaagtccactaatcttgtaaaaaacaaatgcgtgaacttcaatttcggatccggcggcggcggtgacggtggtggcggctccggagacaagacccacacctgccccccttgtcctgcccctgagctgctgggcggaccctccgtgtttctgttcccccccaagcccaaggacaccctgatgatcagccggacccccgaggtcacctgcgtggtggtggacgtcagccacgaggacccagaggtcaagttcaattggtatgtggacggcgtggaggtgcacaacgccaagaccaagccccgggaggaacagtacaacagcacctaccgggtggtgtccgtgctgaccgtgctgcaccaggactggctgaacggcaaagaatacaagtgcaaggtgtccaacaaggccctgcctgcccccatcgagaaaaccatcagcaaggccaagggccagcccagagaaccccaggtgtacaccctgccccctagcagggaagagctgaccaagaaccaggtgtccctgacctgtctggtcaagggcttctaccccagcgatatcgccgtggagtgggagagcaacggccagcctgagaacaactacaagaccaccccccctgtgctggacagcgacggcagcttcttcctgtacagcaagctgaccgtggacaagagccggtggcagcagggcaacgtgtttagctgcagcgtgatgcacgaggccctgcacaaccactacacccagaagagcttaagcctgtcccctggcagt

SEQ ID NO: 645 - DNA, 1392 bp, synthetic construct
  misc_feature 1..1392: note = Synthetic
  source 1..1392: mol_type = other DNA
agggttcagcccaccgaatcaatagtacggttcccaaatatcactaatctttgccccttcggggaagtatttaacgctactcgatttgctagcgtatatgcctggaaccggaagagaataagcaactgtgttgcagactatagcgtgctttacaattccgcatcctttagtaccttcaaatgttacggtgtgagccccaccaaactcaatgatctctgtttcacaaacgtgtacgcagatagtttcgttatacgcggggacgaagtacggcagatagcccctggccagacaggaaagatagccgattacaactacaaacttccagacgattttacagggtgtgtgatcgcttggaattcaaataacctggactccaaagtgggaggcaactataattacctgtaccgactgttccgcaaaagcaacttgaaacctttcgagcgagatatatcaaccgaaatctaccaagctggttctacaccttgtaatggtgtggagggatttaactgctacttccctcttcagtcctatggatttcagcctacaaatggagtcgggtatcaaccctatagagtcgtggtgttgtcatttgaacttctccatgcacctgctactgtctgtggtccaaaaaagtccactaatcttgtaaaaaacaaatgcgtgaacttcaatggatccggcggcggcggtgacggtggtggcggctccggagacaagacccacacctgccccccttgtcctgcccctgagctgctgggcggaccctccgtgtttctgttcccccccaagcccaaggacaccctgatgatcagccggacccccgaggtcacctgcgtggtggtggacgtcagccacgaggacccagaggtcaagttcaattggtatgtggacggcgtggaggtgcacaacgccaagaccaagccccgggaggaacagtacaacagcacctaccgggtggtgtccgtgctgaccgtgctgcaccaggactggctgaacggcaaagaatacaagtgcaaggtgtccaacaaggccctgcctgcccccatcgagaaaaccatcagcaaggccaagggccagcccagagaaccccaggtgtacaccctgccccctagcagggaagagctgaccaagaaccaggtgtccctgacctgtctggtcaagggcttctaccccagcgatatcgccgtggagtgggagagcaacggccagcctgagaacaactacaagaccaccccccctgtgctggacagcgacggcagcttcttcctgtacagcaagctgaccgtggacaagagccggtggcagcagggcaacgtgtttagctgcagcgtgatgcacgaggccctgcacaaccactacacccagaagagcttaagcctgtcccctggcagt

SEQ ID NO: 646 - DNA, 1389 bp, synthetic construct
  misc_feature 1..1389: note = Synthetic
  source 1..1389: mol_type = other DNA
agggttcagcccaccgaatcaatagtacggttcccaaatatcactaatctttgccccttcggggaagtatttaacgctactcgatttgctagcgtatatgcctggaaccggaagagaataagcaactgtgttgcagactatagcgtgctttacaattccgcatcctttagtaccttcaaatgttacggtgtgagccccaccaaactcaatgatctctgtttcacaaacgtgtacgcagatagtttcgttatacgcggggacgaagtacggcagatagcccctggccagacaggaaagatagccgattacaactacaaacttccagacgattttacagggtgtgtgatcgcttggaattcaaataacctggactccaaagtgggaggcaactataattacctgtaccgactgttccgcaaaagcaacttgaaacctttcgagcgagatatatcaaccgaaatctaccaagctggttctacaccttgtaatggtgtggagggatttaactgctacttccctcttcagtcctatggatttcagcctacaaatggagtcgggtatcaaccctatagagtcgtggtgttgtcatttgaacttctccatgcacctgctactgtctgtggtccaaaaaagtccactaatcttgtaaaaaacaaatgcgtgaacttcggatccggcggcggcggtgacggtggtggcggctccggagacaagacccacacctgccccccttgtcctgcccctgagctgctgggcggaccctccgtgtttctgttcccccccaagcccaaggacaccctgatgatcagccggacccccgaggtcacctgcgtggtggtggacgtcagccacgaggacccagaggtcaagttcaattggtatgtggacggcgtggaggtgcacaacgccaagaccaagccccgggaggaacagtacaacagcacctaccgggtggtgtccgtgctgaccgtgctgcaccaggactggctgaacggcaaagaatacaagtgcaaggtgtccaacaaggccctgcctgcccccatcgagaaaaccatcagcaaggccaagggccagcccagagaaccccaggtgtacaccctgccccctagcagggaagagctgaccaagaaccaggtgtccctgacctgtctggtcaagggcttctaccccagcgatatcgccgtggagtgggagagcaacggccagcctgagaacaactacaagaccaccccccctgtgctggacagcgacggcagcttcttcctgtacagcaagctgaccgtggacaagagccggtggcagcagggcaacgtgtttagctgcagcgtgatgcacgaggccctgcacaaccactacacccagaagagcttaagcctgtcccctggcagt

SEQ ID NO: 647 - DNA, 1386 bp, synthetic construct
  misc_feature 1..1386: note = Synthetic
  source 1..1386: mol_type = other DNA
agggttcagcccaccgaatcaatagtacggttcccaaatatcactaatctttgccccttcggggaagtatttaacgctactcgatttgctagcgtatatgcctggaaccggaagagaataagcaactgtgttgcagactatagcgtgctttacaattccgcatcctttagtaccttcaaatgttacggtgtgagccccaccaaactcaatgatctctgtttcacaaacgtgtacgcagatagtttcgttatacgcggggacgaagtacggcagatagcccctggccagacaggaaagatagccgattacaactacaaacttccagacgattttacagggtgtgtgatcgcttggaattcaaataacctggactccaaagtgggaggcaactataattacctgtaccgactgttccgcaaaagcaacttgaaacctttcgagcgagatatatcaaccgaaatctaccaagctggttctacaccttgtaatggtgtggagggatttaactgctacttccctcttcagtcctatggatttcagcctacaaatggagtcgggtatcaaccctatagagtcgtggtgttgtcatttgaacttctccatgcacctgctactgtctgtggtccaaaaaagtccactaatcttgtaaaaaacaaatgcgtgaacggatccggcggcggcggtgacggtggtggcggctccggagacaagacccacacctgccccccttgtcctgcccctgagctgctgggcggaccctccgtgtttctgttcccccccaagcccaaggacaccctgatgatcagccggacccccgaggtcacctgcgtggtggtggacgtcagccacgaggacccagaggtcaagttcaattggtatgtggacggcgtggaggtgcacaacgccaagaccaagccccgggaggaacagtacaacagcacctaccgggtggtgtccgtgctgaccgtgctgcaccaggactggctgaacggcaaagaatacaagtgcaaggtgtccaacaaggccctgcctgcccccatcgagaaaaccatcagcaaggccaagggccagcccagagaaccccaggtgtacaccctgccccctagcagggaagagctgaccaagaaccaggtgtccctgacctgtctggtcaagggcttctaccccagcgatatcgccgtggagtgggagagcaacggccagcctgagaacaactacaagaccaccccccctgtgctggacagcgacggcagcttcttcctgtacagcaagctgaccgtggacaagagccggtggcagcagggcaacgtgtttagctgcagcgtgatgcacgaggccctgcacaaccactacacccagaagagcttaagcctgtcccctggcagt

SEQ ID NO: 648 - DNA, 1383 bp, synthetic construct
  misc_feature 1..1383: note = Synthetic
  source 1..1383: mol_type = other DNA
agggttcagcccaccgaatcaatagtacggttcccaaatatcactaatctttgccccttcggggaagtatttaacgctactcgatttgctagcgtatatgcctggaaccggaagagaataagcaactgtgttgcagactatagcgtgctttacaattccgcatcctttagtaccttcaaatgttacggtgtgagccccaccaaactcaatgatctctgtttcacaaacgtgtacgcagatagtttcgttatacgcggggacgaagtacggcagatagcccctggccagacaggaaagatagccgattacaactacaaacttccagacgattttacagggtgtgtgatcgcttggaattcaaataacctggactccaaagtgggaggcaactataattacctgtaccgactgttccgcaaaagcaacttgaaacctttcgagcgagatatatcaaccgaaatctaccaagctggttctacaccttgtaatggtgtggagggatttaactgctacttccctcttcagtcctatggatttcagcctacaaatggagtcgggtatcaaccctatagagtcgtggtgttgtcatttgaacttctccatgcacctgctactgtctgtggtccaaaaaagtccactaatcttgtaaaaaacaaatgcgtgggatccggcggcggcggtgacggtggtggcggctccggagacaagacccacacctgccccccttgtcctgcccctgagctgctgggcggaccctccgtgtttctgttcccccccaagcccaaggacaccctgatgatcagccggacccccgaggtcacctgcgtggtggtggacgtcagccacgaggacccagaggtcaagttcaattggtatgtggacggcgtggaggtgcacaacgccaagaccaagccccgggaggaacagtacaacagcacctaccgggtggtgtccgtgctgaccgtgctgcaccaggactggctgaacggcaaagaatacaagtgcaaggtgtccaacaaggccctgcctgcccccatcgagaaaaccatcagcaaggccaagggccagcccagagaaccccaggtgtacaccctgccccctagcagggaagagctgaccaagaaccaggtgtccctgacctgtctggtcaagggcttctaccccagcgatatcgccgtggagtgggagagcaacggccagcctgagaacaactacaagaccaccccccctgtgctggacagcgacggcagcttcttcctgtacagcaagctgaccgtggacaagagccggtggcagcagggcaacgtgtttagctgcagcgtgatgcacgaggccctgcacaaccactacacccagaagagcttaagcctgtcccctggcagt

SEQ ID NO: 649 - DNA, 1380 bp, synthetic construct
  misc_feature 1..1380: note = Synthetic
  source 1..1380: mol_type = other DNA
agggttcagcccaccgaatcaatagtacggttcccaaatatcactaatctttgccccttcggggaagtatttaacgctactcgatttgctagcgtatatgcctggaaccggaagagaataagcaactgtgttgcagactatagcgtgctttacaattccgcatcctttagtaccttcaaatgttacggtgtgagccccaccaaactcaatgatctctgtttcacaaacgtgtacgcagatagtttcgttatacgcggggacgaagtacggcagatagcccctggccagacaggaaagatagccgattacaactacaaacttccagacgattttacagggtgtgtgatcgcttggaattcaaataacctggactccaaagtgggaggcaactataattacctgtaccgactgttccgcaaaagcaacttgaaacctttcgagcgagatatatcaaccgaaatctaccaagctggttctacaccttgtaatggtgtggagggatttaactgctacttccctcttcagtcctatggatttcagcctacaaatggagtcgggtatcaaccctatagagtcgtggtgttgtcatttgaacttctccatgcacctgctactgtctgtggtccaaaaaagtccactaatcttgtaaaaaacaaatgcggatccggcggcggcggtgacggtggtggcggctccggagacaagacccacacctgccccccttgtcctgcccctgagctgctgggcggaccctccgtgtttctgttcccccccaagcccaaggacaccctgatgatcagccggacccccgaggtcacctgcgtggtggtggacgtcagccacgaggacccagaggtcaagttcaattggtatgtggacggcgtggaggtgcacaacgccaagaccaagccccgggaggaacagtacaacagcacctaccgggtggtgtccgtgctgaccgtgctgcaccaggactggctgaacggcaaagaatacaagtgcaaggtgtccaacaaggccctgcctgcccccatcgagaaaaccatcagcaaggccaagggccagcccagagaaccccaggtgtacaccctgccccctagcagggaagagctgaccaagaaccaggtgtccctgacctgtctggtcaagggcttctaccccagcgatatcgccgtggagtgggagagcaacggccagcctgagaacaactacaagaccaccccccctgtgctggacagcgacggcagcttcttcctgtacagcaagctgaccgtggacaagagccggtggcagcagggcaacgtgtttagctgcagcgtgatgcacgaggccctgcacaaccactacacccagaagagcttaagcctgtcccctggcagt

SEQ ID NO: 650 - DNA, 1377 bp, synthetic construct
  misc_feature 1..1377: note = Synthetic
  source 1..1377: mol_type = other DNA
agggttcagcccaccgaatcaatagtacggttcccaaatatcactaatctttgccccttcggggaagtatttaacgctactcgatttgctagcgtatatgcctggaaccggaagagaataagcaactgtgttgcagactatagcgtgctttacaattccgcatcctttagtaccttcaaatgttacggtgtgagccccaccaaactcaatgatctctgtttcacaaacgtgtacgcagatagtttcgttatacgcggggacgaagtacggcagatagcccctggccagacaggaaagatagccgattacaactacaaacttccagacgattttacagggtgtgtgatcgcttggaattcaaataacctggactccaaagtgggaggcaactataattacctgtaccgactgttccgcaaaagcaacttgaaacctttcgagcgagatatatcaaccgaaatctaccaagctggttctacaccttgtaatggtgtggagggatttaactgctacttccctcttcagtcctatggatttcagcctacaaatggagtcgggtatcaaccctatagagtcgtggtgttgtcatttgaacttctccatgcacctgctactgtctgtggtccaaaaaagtccactaatcttgtaaaaaacaaaggatccggcggcggcggtgacggtggtggcggctccggagacaagacccacacctgccccccttgtcctgcccctgagctgctgggcggaccctccgtgtttctgttcccccccaagcccaaggacaccctgatgatcagccggacccccgaggtcacctgcgtggtggtggacgtcagccacgaggacccagaggtcaagttcaattggtatgtggacggcgtggaggtgcacaacgccaagaccaagccccgggaggaacagtacaacagcacctaccgggtggtgtccgtgctgaccgtgctgcaccaggactggctgaacggcaaagaatacaagtgcaaggtgtccaacaaggccctgcctgcccccatcgagaaaaccatcagcaaggccaagggccagcccagagaaccccaggtgtacaccctgccccctagcagggaagagctgaccaagaaccaggtgtccctgacctgtctggtcaagggcttctaccccagcgatatcgccgtggagtgggagagcaacggccagcctgagaacaactacaagaccaccccccctgtgctggacagcgacggcagcttcttcctgtacagcaagctgaccgtggacaagagccggtggcagcagggcaacgtgtttagctgcagcgtgatgcacgaggccctgcacaaccactacacccagaagagcttaagcctgtcccctggcagt

SEQ ID NO: 651 - DNA, 1374 bp, synthetic construct
  misc_feature 1..1374: note = Synthetic
  source 1..1374: mol_type = other DNA
agggttcagcccaccgaatcaatagtacggttcccaaatatcactaatctttgccccttcggggaagtatttaacgctactcgatttgctagcgtatatgcctggaaccggaagagaataagcaactgtgttgcagactatagcgtgctttacaattccgcatcctttagtaccttcaaatgttacggtgtgagccccaccaaactcaatgatctctgtttcacaaacgtgtacgcagatagtttcgttatacgcggggacgaagtacggcagatagcccctggccagacaggaaagatagccgattacaactacaaacttccagacgattttacagggtgtgtgatcgcttggaattcaaataacctggactccaaagtgggaggcaactataattacctgtaccgactgttccgcaaaagcaacttgaaacctttcgagcgagatatatcaaccgaaatctaccaagctggttctacaccttgtaatggtgtggagggatttaactgctacttccctcttcagtcctatggatttcagcctacaaatggagtcgggtatcaaccctatagagtcgtggtgttgtcatttgaacttctccatgcacctgctactgtctgtggtccaaaaaagtccactaatcttgtaaaaaacggatccggcggcggcggtgacggtggtggcggctccggagacaagacccacacctgccccccttgtcctgcccctgagctgctgggcggaccctccgtgtttctgttcccccccaagcccaaggacaccctgatgatcagccggacccccgaggtcacctgcgtggtggtggacgtcagccacgaggacccagaggtcaagttcaattggtatgtggacggcgtggaggtgcacaacgccaagaccaagccccgggaggaacagtacaacagcacctaccgggtggtgtccgtgctgaccgtgctgcaccaggactggctgaacggcaaagaatacaagtgcaaggtgtccaacaaggccctgcctgcccccatcgagaaaaccatcagcaaggccaagggccagcccagagaaccccaggtgtacaccctgccccctagcagggaagagctgaccaagaaccaggtgtccctgacctgtctggtcaagggcttctaccccagcgatatcgccgtggagtgggagagcaacggccagcctgagaacaactacaagaccaccccccctgtgctggacagcgacggcagcttcttcctgtacagcaagctgaccgtggacaagagccggtggcagcagggcaacgtgtttagctgcagcgtgatgcacgaggccctgcacaaccactacacccagaagagcttaagcctgtcccctggcagt

SEQ ID NO: 652 - DNA, 1371 bp, synthetic construct
  misc_feature 1..1371: note = Synthetic
  source 1..1371: mol_type = other DNA
agggttcagcccaccgaatcaatagtacggttcccaaatatcactaatctttgccccttcggggaagtatttaacgctactcgatttgctagcgtatatgcctggaaccggaagagaataagcaactgtgttgcagactatagcgtgctttacaattccgcatcctttagtaccttcaaatgttacggtgtgagccccaccaaactcaatgatctctgtttcacaaacgtgtacgcagatagtttcgttatacgcggggacgaagtacggcagatagcccctggccagacaggaaagatagccgattacaactacaaacttccagacgattttacagggtgtgtgatcgcttggaattcaaataacctggactccaaagtgggaggcaactataattacctgtaccgactgttccgcaaaagcaacttgaaacctttcgagcgagatatatcaaccgaaatctaccaagctggttctacaccttgtaatggtgtggagggatttaactgctacttccctcttcagtcctatggatttcagcctacaaatggagtcgggtatcaaccctatagagtcgtggtgttgtcatttgaacttctccatgcacctgctactgtctgtggtccaaaaaagtccactaatcttgtaaaaggatccggcggcggcggtgacggtggtggcggctccggagacaagacccacacctgccccccttgtcctgcccctgagctgctgggcggaccctccgtgtttctgttcccccccaagcccaaggacaccctgatgatcagccggacccccgaggtcacctgcgtggtggtggacgtcagccacgaggacccagaggtcaagttcaattggtatgtggacggcgtggaggtgcacaacgccaagaccaagccccgggaggaacagtacaacagcacctaccgggtggtgtccgtgctgaccgtgctgcaccaggactggctgaacggcaaagaatacaagtgcaaggtgtccaacaaggccctgcctgcccccatcgagaaaaccatcagcaaggccaagggccagcccagagaaccccaggtgtacaccctgccccctagcagggaagagctgaccaagaaccaggtgtccctgacctgtctggtcaagggcttctaccccagcgatatcgccgtggagtgggagagcaacggccagcctgagaacaactacaagaccaccccccctgtgctggacagcgacggcagcttcttcctgtacagcaagctgaccgtggacaagagccggtggcagcagggcaacgtgtttagctgcagcgtgatgcacgaggccctgcacaaccactacacccagaagagcttaagcctgtcccctggcagt

SEQ ID NO: 653 - DNA, 1368 bp, synthetic construct
  misc_feature 1..1368: note = Synthetic
  source 1..1368: mol_type = other DNA
agggttcagcccaccgaatcaatagtacggttcccaaatatcactaatctttgccccttcggggaagtatttaacgctactcgatttgctagcgtatatgcctggaaccggaagagaataagcaactgtgttgcagactatagcgtgctttacaattccgcatcctttagtaccttcaaatgttacggtgtgagccccaccaaactcaatgatctctgtttcacaaacgtgtacgcagatagtttcgttatacgcggggacgaagtacggcagatagcccctggccagacaggaaagatagccgattacaactacaaacttccagacgattttacagggtgtgtgatcgcttggaattcaaataacctggactccaaagtgggaggcaactataattacctgtaccgactgttccgcaaaagcaacttgaaacctttcgagcgagatatatcaaccgaaatctaccaagctggttctacaccttgtaatggtgtggagggatttaactgctacttccctcttcagtcctatggatttcagcctacaaatggagtcgggtatcaaccctatagagtcgtggtgttgtcatttgaacttctccatgcacctgctactgtctgtggtccaaaaaagtccactaatcttgtaggatccggcggcggcggtgacggtggtggcggctccggagacaagacccacacctgccccccttgtcctgcccctgagctgctgggcggaccctccgtgtttctgttcccccccaagcccaaggacaccctgatgatcagccggacccccgaggtcacctgcgtggtggtggacgtcagccacgaggacccagaggtcaagttcaattggtatgtggacggcgtggaggtgcacaacgccaagaccaagccccgggaggaacagtacaacagcacctaccgggtggtgtccgtgctgaccgtgctgcaccaggactggctgaacggcaaagaatacaagtgcaaggtgtccaacaaggccctgcctgcccccatcgagaaaaccatcagcaaggccaagggccagcccagagaaccccaggtgtacaccctgccccctagcagggaagagctgaccaagaaccaggtgtccctgacctgtctggtcaagggcttctaccccagcgatatcgccgtggagtgggagagcaacggccagcctgagaacaactacaagaccaccccccctgtgctggacagcgacggcagcttcttcctgtacagcaagctgaccgtggacaagagccggtggcagcagggcaacgtgtttagctgcagcgtgatgcacgaggccctgcacaaccactacacccagaagagcttaagcctgtcccctggcagt

SEQ ID NO: 654 - DNA, 1365 bp, synthetic construct
  misc_feature 1..1365: note = Synthetic
  source 1..1365: mol_type = other DNA
agggttcagcccaccgaatcaatagtacggttcccaaatatcactaatctttgccccttcggggaagtatttaacgctactcgatttgctagcgtatatgcctggaaccggaagagaataagcaactgtgttgcagactatagcgtgctttacaattccgcatcctttagtaccttcaaatgttacggtgtgagccccaccaaactcaatgatctctgtttcacaaacgtgtacgcagatagtttcgttatacgcggggacgaagtacggcagatagcccctggccagacaggaaagatagccgattacaactacaaacttccagacgattttacagggtgtgtgatcgcttggaattcaaataacctggactccaaagtgggaggcaactataattacctgtaccgactgttccgcaaaagcaacttgaaacctttcgagcgagatatatcaaccgaaatctaccaagctggttctacaccttgtaatggtgtggagggatttaactgctacttccctcttcagtcctatggatttcagcctacaaatggagtcgggtatcaaccctatagagtcgtggtgttgtcatttgaacttctccatgcacctgctactgtctgtggtccaaaaaagtccactaatcttggatccggcggcggcggtgacggtggtggcggctccggagacaagacccacacctgccccccttgtcctgcccctgagctgctgggcggaccctccgtgtttctgttcccccccaagcccaaggacaccctgatgatcagccggacccccgaggtcacctgcgtggtggtggacgtcagccacgaggacccagaggtcaagttcaattggtatgtggacggcgtggaggtgcacaacgccaagaccaagccccgggaggaacagtacaacagcacctaccgggtggtgtccgtgctgaccgtgctgcaccaggactggctgaacggcaaagaatacaagtgcaaggtgtccaacaaggccctgcctgcccccatcgagaaaaccatcagcaaggccaagggccagcccagagaaccccaggtgtacaccctgccccctagcagggaagagctgaccaagaaccaggtgtccctgacctgtctggtcaagggcttctaccccagcgatatcgccgtggagtgggagagcaacggccagcctgagaacaactacaagaccaccccccctgtgctggacagcgacggcagcttcttcctgtacagcaagctgaccgtggacaagagccggtggcagcagggcaacgtgtttagctgcagcgtgatgcacgaggccctgcacaaccactacacccagaagagcttaagcctgtcccctggcagt

SEQ ID NO: 655 - DNA, 1362 bp, synthetic construct
  misc_feature 1..1362: note = Synthetic
  source 1..1362: mol_type = other DNA
agggttcagcccaccgaatcaatagtacggttcccaaatatcactaatctttgccccttcggggaagtatttaacgctactcgatttgctagcgtatatgcctggaaccggaagagaataagcaactgtgttgcagactatagcgtgctttacaattccgcatcctttagtaccttcaaatgttacggtgtgagccccaccaaactcaatgatctctgtttcacaaacgtgtacgcagatagtttcgttatacgcggggacgaagtacggcagatagcccctggccagacaggaaagatagccgattacaactacaaacttccagacgattttacagggtgtgtgatcgcttggaattcaaataacctggactccaaagtgggaggcaactataattacctgtaccgactgttccgcaaaagcaacttgaaacctttcgagcgagatatatcaaccgaaatctaccaagctggttctacaccttgtaatggtgtggagggatttaactgctacttccctcttcagtcctatggatttcagcctacaaatggagtcgggtatcaaccctatagagtcgtggtgttgtcatttgaacttctccatgcacctgctactgtctgtggtccaaaaaagtccactaatggatccggcggcggcggtgacggtggtggcggctccggagacaagacccacacctgccccccttgtcctgcccctgagctgctgggcggaccctccgtgtttctgttcccccccaagcccaaggacaccctgatgatcagccggacccccgaggtcacctgcgtggtggtggacgtcagccacgaggacccagaggtcaagttcaattggtatgtggacggcgtggaggtgcacaacgccaagaccaagccccgggaggaacagtacaacagcacctaccgggtggtgtccgtgctgaccgtgctgcaccaggactggctgaacggcaaagaatacaagtgcaaggtgtccaacaaggccctgcctgcccccatcgagaaaaccatcagcaaggccaagggccagcccagagaaccccaggtgtacaccctgccccctagcagggaagagctgaccaagaaccaggtgtccctgacctgtctggtcaagggcttctaccccagcgatatcgccgtggagtgggagagcaacggccagcctgagaacaactacaagaccaccccccctgtgctggacagcgacggcagcttcttcctgtacagcaagctgaccgtggacaagagccggtggcagcagggcaacgtgtttagctgcagcgtgatgcacgaggccctgcacaaccactacacccagaagagcttaagcctgtcccctggcagt

SEQ ID NO: 656 - DNA, 1359 bp, synthetic construct
  misc_feature 1..1359: note = Synthetic
  source 1..1359: mol_type = other DNA
agggttcagcccaccgaatcaatagtacggttcccaaatatcactaatctttgccccttcggggaagtatttaacgctactcgatttgctagcgtatatgcctggaaccggaagagaataagcaactgtgttgcagactatagcgtgctttacaattccgcatcctttagtaccttcaaatgttacggtgtgagccccaccaaactcaatgatctctgtttcacaaacgtgtacgcagatagtttcgttatacgcggggacgaagtacggcagatagcccctggccagacaggaaagatagccgattacaactacaaacttccagacgattttacagggtgtgtgatcgcttggaattcaaataacctggactccaaagtgggaggcaactataattacctgtaccgactgttccgcaaaagcaacttgaaacctttcgagcgagatatatcaaccgaaatctaccaagctggttctacaccttgtaatggtgtggagggatttaactgctacttccctcttcagtcctatggatttcagcctacaaatggagtcgggtatcaaccctatagagtcgtggtgttgtcatttgaacttctccatgcacctgctactgtctgtggtccaaaaaagtccactggatccggcggcggcggtgacggtggtggcggctccggagacaagacccacacctgccccccttgtcctgcccctgagctgctgggcggaccctccgtgtttctgttcccccccaagcccaaggacaccctgatgatcagccggacccccgaggtcacctgcgtggtggtggacgtcagccacgaggacccagaggtcaagttcaattggtatgtggacggcgtggaggtgcacaacgccaagaccaagccccgggaggaacagtacaacagcacctaccgggtggtgtccgtgctgaccgtgctgcaccaggactggctgaacggcaaagaatacaagtgcaaggtgtccaacaaggccctgcctgcccccatcgagaaaaccatcagcaaggccaagggccagcccagagaaccccaggtgtacaccctgccccctagcagggaagagctgaccaagaaccaggtgtccctgacctgtctggtcaagggcttctaccccagcgatatcgccgtggagtgggagagcaacggccagcctgagaacaactacaagaccaccccccctgtgctggacagcgacggcagcttcttcctgtacagcaagctgaccgtggacaagagccggtggcagcagggcaacgtgtttagctgcagcgtgatgcacgaggccctgcacaaccactacacccagaagagcttaagcctgtcccctggcagt

SEQ ID NO: 657 - DNA, 1356 bp, synthetic construct
  misc_feature 1..1356: note = Synthetic
  source 1..1356: mol_type = other DNA
agggttcagcccaccgaatcaatagtacggttcccaaatatcactaatctttgccccttcggggaagtatttaacgctactcgatttgctagcgtatatgcctggaaccggaagagaataagcaactgtgttgcagactatagcgtgctttacaattccgcatcctttagtaccttcaaatgttacggtgtgagccccaccaaactcaatgatctctgtttcacaaacgtgtacgcagatagtttcgttatacgcggggacgaagtacggcagatagcccctggccagacaggaaagatagccgattacaactacaaacttccagacgattttacagggtgtgtgatcgcttggaattcaaataacctggactccaaagtgggaggcaactataattacctgtaccgactgttccgcaaaagcaacttgaaacctttcgagcgagatatatcaaccgaaatctaccaagctggttctacaccttgtaatggtgtggagggatttaactgctacttccctcttcagtcctatggatttcagcctacaaatggagtcgggtatcaaccctatagagtcgtggtgttgtcatttgaacttctccatgcacctgctactgtctgtggtccaaaaaagtccggatccggcggcggcggtgacggtggtggcggctccggagacaagacccacacctgccccccttgtcctgcccctgagctgctgggcggaccctccgtgtttctgttcccccccaagcccaaggacaccctgatgatcagccggacccccgaggtcacctgcgtggtggtggacgtcagccacgaggacccagaggtcaagttcaattggtatgtggacggcgtggaggtgcacaacgccaagaccaagccccgggaggaacagtacaacagcacctaccgggtggtgtccgtgctgaccgtgctgcaccaggactggctgaacggcaaagaatacaagtgcaaggtgtccaacaaggccctgcctgcccccatcgagaaaaccatcagcaaggccaagggccagcccagagaaccccaggtgtacaccctgccccctagcagggaagagctgaccaagaaccaggtgtccctgacctgtctggtcaagggcttctaccccagcgatatcgccgtggagtgggagagcaacggccagcctgagaacaactacaagaccaccccccctgtgctggacagcgacggcagcttcttcctgtacagcaagctgaccgtggacaagagccggtggcagcagggcaacgtgtttagctgcagcgtgatgcacgaggccctgcacaaccactacacccagaagagcttaagcctgtcccctggcagt

SEQ ID NO: 658 - DNA, 1467 bp, synthetic construct
  misc_feature 1..1467: note = Synthetic
  source 1..1467: mol_type = other DNA
gttcagcccaccgaatcaatagtacggttcccaaatatcactaatctttgccccttcggggaagtatttaacgctactcgatttgctagcgtatatgcctggaaccggaagagaataagcaactgtgttgcagactatagcgtgctttacaattccgcatcctttagtaccttcaaatgttacggtgtgagccccaccaaactcaatgatctctgtttcacaaacgtgtacgcagatagtttcgttatacgcggggacgaagtacggcagatagcccctggccagacaggaaagatagccgattacaactacaaacttccagacgattttacagggtgtgtgatcgcttggaattcaaataacctggactccaaagtgggaggcaactataattacctgtaccgactgttccgcaaaagcaacttgaaacctttcgagcgagatatatcaaccgaaatctaccaagctggttctacaccttgtaatggtgtggagggatttaactgctacttccctcttcagtcctatggatttcagcctacaaatggagtcgggtatcaaccctatagagtcgtggtgttgtcatttgaacttctccatgcacctgctactgtctgtggtccaaaaaagtccactaatcttgtaaaaaacaaatgcgtgaacttcaatttcaatggcctcaccggaacaggtgttttgacagaatctaacaaaaaattccttcccttccagcaattcgggagagatggatccggcggcggcggtgacggtggtggcggctccggagacaagacccacacctgccccccttgtcctgcccctgagctgctgggcggaccctccgtgtttctgttcccccccaagcccaaggacaccctgatgatcagccggacccccgaggtcacctgcgtggtggtggacgtcagccacgaggacccagaggtcaagttcaattggtatgtggacggcgtggaggtgcacaacgccaagaccaagccccgggaggaacagtacaacagcacctaccgggtggtgtccgtgctgaccgtgctgcaccaggactggctgaacggcaaagaatacaagtgcaaggtgtccaacaaggccctgcctgcccccatcgagaaaaccatcagcaaggccaagggccagcccagagaaccccaggtgtacaccctgccccctagcagggaagagctgaccaagaaccaggtgtccctgacctgtctggtcaagggcttctaccccagcgatatcgccgtggagtgggagagcaacggccagcctgagaacaactacaagaccaccccccctgtgctggacagcgacggcagcttcttcctgtacagcaagctgaccgtggacaagagccggtggcagcagggcaacgtgtttagctgcagcgtgatgcacgaggccctgcacaaccactacacccagaagagcttaagcctgtcccctggcagt

SEQ ID NO: 659 - DNA, 1464 bp, synthetic construct
  misc_feature 1..1464: note = Synthetic
  source 1..1464: mol_type = other DNA
cagcccaccgaatcaatagtacggttcccaaatatcactaatctttgccccttcggggaagtatttaacgctactcgatttgctagcgtatatgcctggaaccggaagagaataagcaactgtgttgcagactatagcgtgctttacaattccgcatcctttagtaccttcaaatgttacggtgtgagccccaccaaactcaatgatctctgtttcacaaacgtgtacgcagatagtttcgttatacgcggggacgaagtacggcagatagcccctggccagacaggaaagatagccgattacaactacaaacttccagacgattttacagggtgtgtgatcgcttggaattcaaataacctggactccaaagtgggaggcaactataattacctgtaccgactgttccgcaaaagcaacttgaaacctttcgagcgagatatatcaaccgaaatctaccaagctggttctacaccttgtaatggtgtggagggatttaactgctacttccctcttcagtcctatggatttcagcctacaaatggagtcgggtatcaaccctatagagtcgtggtgttgtcatttgaacttctccatgcacctgctactgtctgtggtccaaaaaagtccactaatcttgtaaaaaacaaatgcgtgaacttcaatttcaatggcctcaccggaacaggtgttttgacagaatctaacaaaaaattccttcccttccagcaattcgggagagatggatccggcggcggcggtgacggtggtggcggctccggagacaagacccacacctgccccccttgtcctgcccctgagctgctgggcggaccctccgtgtttctgttcccccccaagcccaaggacaccctgatgatcagccggacccccgaggtcacctgcgtggtggtggacgtcagccacgaggacccagaggtcaagttcaattggtatgtggacggcgtggaggtgcacaacgccaagaccaagccccgggaggaacagtacaacagcacctaccgggtggtgtccgtgctgaccgtgctgcaccaggactggctgaacggcaaagaatacaagtgcaaggtgtccaacaaggccctgcctgcccccatcgagaaaaccatcagcaaggccaagggccagcccagagaaccccaggtgtacaccctgccccctagcagggaagagctgaccaagaaccaggtgtccctgacctgtctggtcaagggcttctaccccagcgatatcgccgtggagtgggagagcaacggccagcctgagaacaactacaagaccaccccccctgtgctggacagcgacggcagcttcttcctgtacagcaagctgaccgtggacaagagccggtggcagcagggcaacgtgtttagctgcagcgtgatgcacgaggccctgcacaaccactacacccagaagagcttaagcctgtcccctggcagt

SEQ ID NO: 660 - DNA, 1461 bp, synthetic construct
  misc_feature 1..1461: note = Synthetic
  source 1..1461: mol_type = other DNA
cccaccgaatcaatagtacggttcccaaatatcactaatctttgccccttcggggaagtatttaacgctactcgatttgctagcgtatatgcctggaaccggaagagaataagcaactgtgttgcagactatagcgtgctttacaattccgcatcctttagtaccttcaaatgttacggtgtgagccccaccaaactcaatgatctctgtttcacaaacgtgtacgcagatagtttcgttatacgcggggacgaagtacggcagatagcccctggccagacaggaaagatagccgattacaactacaaacttccagacgattttacagggtgtgtgatcgcttggaattcaaataacctggactccaaagtgggaggcaactataattacctgtaccgactgttccgcaaaagcaacttgaaacctttcgagcgagatatatcaaccgaaatctaccaagctggttctacaccttgtaatggtgtggagggatttaactgctacttccctcttcagtcctatggatttcagcctacaaatggagtcgggtatcaaccctatagagtcgtggtgttgtcatttgaacttctccatgcacctgctactgtctgtggtccaaaaaagtccactaatcttgtaaaaaacaaatgcgtgaacttcaatttcaatggcctcaccggaacaggtgttttgacagaatctaacaaaaaattccttcccttccagcaattcgggagagatggatccggcggcggcggtgacggtggtggcggctccggagacaagacccacacctgccccccttgtcctgcccctgagctgctgggcggaccctccgtgtttctgttcccccccaagcccaaggacaccctgatgatcagccggacccccgaggtcacctgcgtggtggtggacgtcagccacgaggacccagaggtcaagttcaattggtatgtggacggcgtggaggtgcacaacgccaagaccaagccccgggaggaacagtacaacagcacctaccgggtggtgtccgtgctgaccgtgctgcaccaggactggctgaacggcaaagaatacaagtgcaaggtgtccaacaaggccctgcctgcccccatcgagaaaaccatcagcaaggccaagggccagcccagagaaccccaggtgtacaccctgccccctagcagggaagagctgaccaagaaccaggtgtccctgacctgtctggtcaagggcttctaccccagcgatatcgccgtggagtgggagagcaacggccagcctgagaacaactacaagaccaccccccctgtgctggacagcgacggcagcttcttcctgtacagcaagctgaccgtggacaagagccggtggcagcagggcaacgtgtttagctgcagcgtgatgcacgaggccctgcacaaccactacacccagaagagcttaagcctgtcccctggcagt

SEQ ID NO: 661 - DNA, 1458 bp, synthetic construct
  misc_feature 1..1458: note = Synthetic
  source 1..1458: mol_type = other DNA
accgaatcaatagtacggttcccaaatatcactaatctttgccccttcggggaagtatttaacgctactcgatttgctagcgtatatgcctggaaccggaagagaataagcaactgtgttgcagactatagcgtgctttacaattccgcatcctttagtaccttcaaatgttacggtgtgagccccaccaaactcaatgatctctgtttcacaaacgtgtacgcagatagtttcgttatacgcggggacgaagtacggcagatagcccctggccagacaggaaagatagccgattacaactacaaacttccagacgattttacagggtgtgtgatcgcttggaattcaaataacctggactccaaagtgggaggcaactataattacctgtaccgactgttccgcaaaagcaacttgaaacctttcgagcgagatatatcaaccgaaatctaccaagctggttctacaccttgtaatggtgtggagggatttaactgctacttccctcttcagtcctatggatttcagcctacaaatggagtcgggtatcaaccctatagagtcgtggtgttgtcatttgaacttctccatgcacctgctactgtctgtggtccaaaaaagtccactaatcttgtaaaaaacaaatgcgtgaacttcaatttcaatggcctcaccggaacaggtgttttgacagaatctaacaaaaaattccttcccttccagcaattcgggagagatggatccggcggcggcggtgacggtggtggcggctccggagacaagacccacacctgccccccttgtcctgcccctgagctgctgggcggaccctccgtgtttctgttcccccccaagcccaaggacaccctgatgatcagccggacccccgaggtcacctgcgtggtggtggacgtcagccacgaggacccagaggtcaagttcaattggtatgtggacggcgtggaggtgcacaacgccaagaccaagccccgggaggaacagtacaacagcacctaccgggtggtgtccgtgctgaccgtgctgcaccaggactggctgaacggcaaagaatacaagtgcaaggtgtccaacaaggccctgcctgcccccatcgagaaaaccatcagcaaggccaagggccagcccagagaaccccaggtgtacaccctgccccctagcagggaagagctgaccaagaaccaggtgtccctgacctgtctggtcaagggcttctaccccagcgatatcgccgtggagtgggagagcaacggccagcctgagaacaactacaagaccaccccccctgtgctggacagcgacggcagcttcttcctgtacagcaagctgaccgtggacaagagccggtggcagcagggcaacgtgtttagctgcagcgtgatgcacgaggccctgcacaaccactacacccagaagagcttaagcctgtcccctggcagt

SEQ ID NO: 662 - DNA, 1455 bp, synthetic construct
  misc_feature 1..1455: note = Synthetic
  source 1..1455: mol_type = other DNA
gaatcaatagtacggttcccaaatatcactaatctttgccccttcggggaagtatttaacgctactcgatttgctagcgtatatgcctggaaccggaagagaataagcaactgtgttgcagactatagcgtgctttacaattccgcatcctttagtaccttcaaatgttacggtgtgagccccaccaaactcaatgatctctgtttcacaaacgtgtacgcagatagtttcgttatacgcggggacgaagtacggcagatagcccctggccagacaggaaagatagccgattacaactacaaacttccagacgattttacagggtgtgtgatcgcttggaattcaaataacctggactccaaagtgggaggcaactataattacctgtaccgactgttccgcaaaagcaacttgaaacctttcgagcgagatatatcaaccgaaatctaccaagctggttctacaccttgtaatggtgtggagggatttaactgctacttccctcttcagtcctatggatttcagcctacaaatggagtcgggtatcaaccctatagagtcgtggtgttgtcatttgaacttctccatgcacctgctactgtctgtggtccaaaaaagtccactaatcttgtaaaaaacaaatgcgtgaacttcaatttcaatggcctcaccggaacaggtgttttgacagaatctaacaaaaaattccttcccttccagcaattcgggagagatggatccggcggcggcggtgacggtggtggcggctccggagacaagacccacacctgccccccttgtcctgcccctgagctgctgggcggaccctccgtgtttctgttcccccccaagcccaaggacaccctgatgatcagccggacccccgaggtcacctgcgtggtggtggacgtcagccacgaggacccagaggtcaagttcaattggtatgtggacggcgtggaggtgcacaacgccaagaccaagccccgggaggaacagtacaacagcacctaccgggtggtgtccgtgctgaccgtgctgcaccaggactggctgaacggcaaagaatacaagtgcaaggtgtccaacaaggccctgcctgcccccatcgagaaaaccatcagcaaggccaagggccagcccagagaaccccaggtgtacaccctgccccctagcagggaagagctgaccaagaaccaggtgtccctgacctgtctggtcaagggcttctaccccagcgatatcgccgtggagtgggagagcaacggccagcctgagaacaactacaagaccaccccccctgtgctggacagcgacggcagcttcttcctgtacagcaagctgaccgtggacaagagccggtggcagcagggcaacgtgtttagctgcagcgtgatgcacgaggccctgcacaaccactacacccagaagagcttaagcctgtcccctggcagt

SEQ ID NO: 663 - DNA, 1452 bp, synthetic construct
  misc_feature 1..1452: note = Synthetic
  source 1..1452: mol_type = other DNA
tcaatagtacggttcccaaatatcactaatctttgccccttcggggaagtatttaacgctactcgatttgctagcgtatatgcctggaaccggaagagaataagcaactgtgttgcagactatagcgtgctttacaattccgcatcctttagtaccttcaaatgttacggtgtgagccccaccaaactcaatgatctctgtttcacaaacgtgtacgcagatagtttcgttatacgcggggacgaagtacggcagatagcccctggccagacaggaaagatagccgattacaactacaaacttccagacgattttacagggtgtgtgatcgcttggaattcaaataacctggactccaaagtgggaggcaactataattacctgtaccgactgttccgcaaaagcaacttgaaacctttcgagcgagatatatcaaccgaaatctaccaagctggttctacaccttgtaatggtgtggagggatttaactgctacttccctcttcagtcctatggatttcagcctacaaatggagtcgggtatcaaccctatagagtcgtggtgttgtcatttgaacttctccatgcacctgctactgtctgtggtccaaaaaagtccactaatcttgtaaaaaacaaatgcgtgaacttcaatttcaatggcctcaccggaacaggtgttttgacagaatctaacaaaaaattccttcccttccagcaattcgggagagatggatccggcggcggcggtgacggtggtggcggctccggagacaagacccacacctgccccccttgtcctgcccctgagctgctgggcggaccctccgtgtttctgttcccccccaagcccaaggacaccctgatgatcagccggacccccgaggtcacctgcgtggtggtggacgtcagccacgaggacccagaggtcaagttcaattggtatgtggacggcgtggaggtgcacaacgccaagaccaagccccgggaggaacagtacaacagcacctaccgggtggtgtccgtgctgaccgtgctgcaccaggactggctgaacggcaaagaatacaagtgcaaggtgtccaacaaggccctgcctgcccccatcgagaaaaccatcagcaaggccaagggccagcccagagaaccccaggtgtacaccctgccccctagcagggaagagctgaccaagaaccaggtgtccctgacctgtctggtcaagggcttctaccccagcgatatcgccgtggagtgggagagcaacggccagcctgagaacaactacaagaccaccccccctgtgctggacagcgacggcagcttcttcctgtacagcaagctgaccgtggacaagagccggtggcagcagggcaacgtgtttagctgcagcgtgatgcacgaggccctgcacaaccactacacccagaagagcttaagcctgtcccctggcagt

SEQ ID NO: 664 - DNA, 1449 bp, synthetic construct
  misc_feature 1..1449: note = Synthetic
  source 1..1449: mol_type = other DNA
atagtacggttcccaaatatcactaatctttgccccttcggggaagtatttaacgctactcgatttgctagcgtatatgcctggaaccggaagagaataagcaactgtgttgcagactatagcgtgctttacaattccgcatcctttagtaccttcaaatgttacggtgtgagccccaccaaactcaatgatctctgtttcacaaacgtgtacgcagatagtttcgttatacgcggggacgaagtacggcagatagcccctggccagacaggaaagatagccgattacaactacaaacttccagacgattttacagggtgtgtgatcgcttggaattcaaataacctggactccaaagtgggaggcaactataattacctgtaccgactgttccgcaaaagcaacttgaaacctttcgagcgagatatatcaaccgaaatctaccaagctggttctacaccttgtaatggtgtggagggatttaactgctacttccctcttcagtcctatggatttcagcctacaaatggagtcgggtatcaaccctatagagtcgtggtgttgtcatttgaacttctccatgcacctgctactgtctgtggtccaaaaaagtccactaatcttgtaaaaaacaaatgcgtgaacttcaatttcaatggcctcaccggaacaggtgttttgacagaatctaacaaaaaattccttcccttccagcaattcgggagagatggatccggcggcggcggtgacggtggtggcggctccggagacaagacccacacctgccccccttgtcctgcccctgagctgctgggcggaccctccgtgtttctgttcccccccaagcccaaggacaccctgatgatcagccggacccccgaggtcacctgcgtggtggtggacgtcagccacgaggacccagaggtcaagttcaattggtatgtggacggcgtggaggtgcacaacgccaagaccaagccccgggaggaacagtacaacagcacctaccgggtggtgtccgtgctgaccgtgctgcaccaggactggctgaacggcaaagaatacaagtgcaaggtgtccaacaaggccctgcctgcccccatcgagaaaaccatcagcaaggccaagggccagcccagagaaccccaggtgtacaccctgccccctagcagggaagagctgaccaagaaccaggtgtccctgacctgtctggtcaagggcttctaccccagcgatatcgccgtggagtgggagagcaacggccagcctgagaacaactacaagaccaccccccctgtgctggacagcgacggcagcttcttcctgtacagcaagctgaccgtggacaagagccggtggcagcagggcaacgtgtttagctgcagcgtgatgcacgaggccctgcacaaccactacacccagaagagcttaagcctgtcccctggcagt

SEQ ID NO: 665 - DNA, 1446 bp, synthetic construct
  misc_feature 1..1446: note = Synthetic
  source 1..1446: mol_type = other DNA
gtacggttcccaaatatcactaatctttgccccttcggggaagtatttaacgctactcgatttgctagcgtatatgcctggaaccggaagagaataagcaactgtgttgcagactatagcgtgctttacaattccgcatcctttagtaccttcaaatgttacggtgtgagccccaccaaactcaatgatctctgtttcacaaacgtgtacgcagatagtttcgttatacgcggggacgaagtacggcagatagcccctggccagacaggaaagatagccgattacaactacaaacttccagacgattttacagggtgtgtgatcgcttggaattcaaataacctggactccaaagtgggaggcaactataattacctgtaccgactgttccgcaaaagcaacttgaaacctttcgagcgagatatatcaaccgaaatctaccaagctggttctacaccttgtaatggtgtggagggatttaactgctacttccctcttcagtcctatggatttcagcctacaaatggagtcgggtatcaaccctatagagtcgtggtgttgtcatttgaacttctccatgcacctgctactgtctgtggtccaaaaaagtccactaatcttgtaaaaaacaaatgcgtgaacttcaatttcaatggcctcaccggaacaggtgttttgacagaatctaacaaaaaattccttcccttccagcaattcgggagagatggatccggcggcggcggtgacggtggtggcggctccggagacaagacccacacctgccccccttgtcctgcccctgagctgctgggcggaccctccgtgtttctgttcccccccaagcccaaggacaccctgatgatcagccggacccccgaggtcacctgcgtggtggtggacgtcagccacgaggacccagaggtcaagttcaattggtatgtggacggcgtggaggtgcacaacgccaagaccaagccccgggaggaacagtacaacagcacctaccgggtggtgtccgtgctgaccgtgctgcaccaggactggctgaacggcaaagaatacaagtgcaaggtgtccaacaaggccctgcctgcccccatcgagaaaaccatcagcaaggccaagggccagcccagagaaccccaggtgtacaccctgccccctagcagggaagagctgaccaagaaccaggtgtccctgacctgtctggtcaagggcttctaccccagcgatatcgccgtggagtgggagagcaacggccagcctgagaacaactacaagaccaccccccctgtgctggacagcgacggcagcttcttcctgtacagcaagctgaccgtggacaagagccggtggcagcagggcaacgtgtttagctgcagcgtgatgcacgaggccctgcacaaccactacacccagaagagcttaagcctgtcccctggcagt

SEQ ID NO: 666 - DNA, 1443 bp, synthetic construct
  misc_feature 1..1443: note = Synthetic
  source 1..1443: mol_type = other DNA
cggttcccaaatatcactaatctttgccccttcggggaagtatttaacgctactcgatttgctagcgtatatgcctggaaccggaagagaataagcaactgtgttgcagactatagcgtgctttacaattccgcatcctttagtaccttcaaatgttacggtgtgagccccaccaaactcaatgatctctgtttcacaaacgtgtacgcagatagtttcgttatacgcggggacgaagtacggcagatagcccctggccagacaggaaagatagccgattacaactacaaacttccagacgattttacagggtgtgtgatcgcttggaattcaaataacctggactccaaagtgggaggcaactataattacctgtaccgactgttccgcaaaagcaacttgaaacctttcgagcgagatatatcaaccgaaatctaccaagctggttctacaccttgtaatggtgtggagggatttaactgctacttccctcttcagtcctatggatttcagcctacaaatggagtcgggtatcaaccctatagagtcgtggtgttgtcatttgaacttctccatgcacctgctactgtctgtggtccaaaaaagtccactaatcttgtaaaaaacaaatgcgtgaacttcaatttcaatggcctcaccggaacaggtgttttgacagaatctaacaaaaaattccttcccttccagcaattcgggagagatggatccggcggcggcggtgacggtggtggcggctccggagacaagacccacacctgccccccttgtcctgcccctgagctgctgggcggaccctccgtgtttctgttcccccccaagcccaaggacaccctgatgatcagccggacccccgaggtcacctgcgtggtggtggacgtcagccacgaggacccagaggtcaagttcaattggtatgtggacggcgtggaggtgcacaacgccaagaccaagccccgggaggaacagtacaacagcacctaccgggtggtgtccgtgctgaccgtgctgcaccaggactggctgaacggcaaagaatacaagtgcaaggtgtccaacaaggccctgcctgcccccatcgagaaaaccatcagcaaggccaagggccagcccagagaaccccaggtgtacaccctgccccctagcagggaagagctgaccaagaaccaggtgtccctgacctgtctggtcaagggcttctaccccagcgatatcgccgtggagtgggagagcaacggccagcctgagaacaactacaagaccaccccccctgtgctggacagcgacggcagcttcttcctgtacagcaagctgaccgtggacaagagccggtggcagcagggcaacgtgtttagctgcagcgtgatgcacgaggccctgcacaaccactacacccagaagagcttaagcctgtcccctggcagt

SEQ ID NO: 667 - DNA, 1440 bp, synthetic construct
  misc_feature 1..1440: note = Synthetic
  source 1..1440: mol_type = other DNA
ttcccaaatatcactaatctttgccccttcggggaagtatttaacgctactcgatttgctagcgtatatgcctggaaccggaagagaataagcaactgtgttgcagactatagcgtgctttacaattccgcatcctttagtaccttcaaatgttacggtgtgagccccaccaaactcaatgatctctgtttcacaaacgtgtacgcagatagtttcgttatacgcggggacgaagtacggcagatagcccctggccagacaggaaagatagccgattacaactacaaacttccagacgattttacagggtgtgtgatcgcttggaattcaaataacctggactccaaagtgggaggcaactataattacctgtaccgactgttccgcaaaagcaacttgaaacctttcgagcgagatatatcaaccgaaatctaccaagctggttctacaccttgtaatggtgtggagggatttaactgctacttccctcttcagtcctatggatttcagcctacaaatggagtcgggtatcaaccctatagagtcgtggtgttgtcatttgaacttctccatgcacctgctactgtctgtggtccaaaaaagtccactaatcttgtaaaaaacaaatgcgtgaacttcaatttcaatggcctcaccggaacaggtgttttgacagaatctaacaaaaaattccttcccttccagcaattcgggagagatggatccggcggcggcggtgacggtggtggcggctccggagacaagacccacacctgccccccttgtcctgcccctgagctgctgggcggaccctccgtgtttctgttcccccccaagcccaaggacaccctgatgatcagccggacccccgaggtcacctgcgtggtggtggacgtcagccacgaggacccagaggtcaagttcaattggtatgtggacggcgtggaggtgcacaacgccaagaccaagccccgggaggaacagtacaacagcacctaccgggtggtgtccgtgctgaccgtgctgcaccaggactggctgaacggcaaagaatacaagtgcaaggtgtccaacaaggccctgcctgcccccatcgagaaaaccatcagcaaggccaagggccagcccagagaaccccaggtgtacaccctgccccctagcagggaagagctgaccaagaaccaggtgtccctgacctgtctggtcaagggcttctaccccagcgatatcgccgtggagtgggagagcaacggccagcctgagaacaactacaagaccaccccccctgtgctggacagcgacggcagcttcttcctgtacagcaagctgaccgtggacaagagccggtggcagcagggcaacgtgtttagctgcagcgtgatgcacgaggccctgcacaaccactacacccagaagagcttaagcctgtcccctggcagt

SEQ ID NO: 668 - DNA, 1437 bp, synthetic construct
  misc_feature 1..1437: note = Synthetic
  source 1..1437: mol_type = other DNA
ccaaatatcactaatctttgccccttcggggaagtatttaacgctactcgatttgctagcgtatatgcctggaaccggaagagaataagcaactgtgttgcagactatagcgtgctttacaattccgcatcctttagtaccttcaaatgttacggtgtgagccccaccaaactcaatgatctctgtttcacaaacgtgtacgcagatagtttcgttatacgcggggacgaagtacggcagatagcccctggccagacaggaaagatagccgattacaactacaaacttccagacgattttacagggtgtgtgatcgcttggaattcaaataacctggactccaaagtgggaggcaactataattacctgtaccgactgttccgcaaaagcaacttgaaacctttcgagcgagatatatcaaccgaaatctaccaagctggttctacaccttgtaatggtgtggagggatttaactgctacttccctcttcagtcctatggatttcagcctacaaatggagtcgggtatcaaccctatagagtcgtggtgttgtcatttgaacttctccatgcacctgctactgtctgtggtccaaaaaagtccactaatcttgtaaaaaacaaatgcgtgaacttcaatttcaatggcctcaccggaacaggtgttttgacagaatctaacaaaaaattccttcccttccagcaattcgggagagatggatccggcggcggcggtgacggtggtggcggctccggagacaagacccacacctgccccccttgtcctgcccctgagctgctgggcggaccctccgtgtttctgttcccccccaagcccaaggacaccctgatgatcagccggacccccgaggtcacctgcgtggtggtggacgtcagccacgaggacccagaggtcaagttcaattggtatgtggacggcgtggaggtgcacaacgccaagaccaagccccgggaggaacagtacaacagcacctaccgggtggtgtccgtgctgaccgtgctgcaccaggactggctgaacggcaaagaatacaagtgcaaggtgtccaacaaggccctgcctgcccccatcgagaaaaccatcagcaaggccaagggccagcccagagaaccccaggtgtacaccctgccccctagcagggaagagctgaccaagaaccaggtgtccctgacctgtctggtcaagggcttctaccccagcgatatcgccgtggagtgggagagcaacggccagcctgagaacaactacaagaccaccccccctgtgctggacagcgacggcagcttcttcctgtacagcaagctgaccgtggacaagagccggtggcagcagggcaacgtgtttagctgcagcgtgatgcacgaggccctgcacaaccactacacccagaagagcttaagcctgtcccctggcagt

SEQ ID NO: 669 - DNA, 1434 bp, synthetic construct
  misc_feature 1..1434: note = Synthetic
  source 1..1434: mol_type = other DNA
aatatcactaatctttgccccttcggggaagtatttaacgctactcgatttgctagcgtatatgcctggaaccggaagagaataagcaactgtgttgcagactatagcgtgctttacaattccgcatcctttagtaccttcaaatgttacggtgtgagccccaccaaactcaatgatctctgtttcacaaacgtgtacgcagatagtttcgttatacgcggggacgaagtacggcagatagcccctggccagacaggaaagatagccgattacaactacaaacttccagacgattttacagggtgtgtgatcgcttggaattcaaataacctggactccaaagtgggaggcaactataattacctgtaccgactgttccgcaaaagcaacttgaaacctttcgagcgagatatatcaaccgaaatctaccaagctggttctacaccttgtaatggtgtggagggatttaactgctacttccctcttcagtcctatggatttcagcctacaaatggagtcgggtatcaaccctatagagtcgtggtgttgtcatttgaacttctccatgcacctgctactgtctgtggtccaaaaaagtccactaatcttgtaaaaaacaaatgcgtgaacttcaatttcaatggcctcaccggaacaggtgttttgacagaatctaacaaaaaattccttcccttccagcaattcgggagagatggatccggcggcggcggtgacggtggtggcggctccggagacaagacccacacctgccccccttgtcctgcccctgagctgctgggcggaccctccgtgtttctgttcccccccaagcccaaggacaccctgatgatcagccggacccccgaggtcacctgcgtggtggtggacgtcagccacgaggacccagaggtcaagttcaattggtatgtggacggcgtggaggtgcacaacgccaagaccaagccccgggaggaacagtacaacagcacctaccgggtggtgtccgtgctgaccgtgctgcaccaggactggctgaacggcaaagaatacaagtgcaaggtgtccaacaaggccctgcctgcccccatcgagaaaaccatcagcaaggccaagggccagcccagagaaccccaggtgtacaccctgccccctagcagggaagagctgaccaagaaccaggtgtccctgacctgtctggtcaagggcttctaccccagcgatatcgccgtggagtgggagagcaacggccagcctgagaacaactacaagaccaccccccctgtgctggacagcgacggcagcttcttcctgtacagcaagctgaccgtggacaagagccggtggcagcagggcaacgtgtttagctgcagcgtgatgcacgaggccctgcacaaccactacacccagaagagcttaagcctgtcccctggcagt

SEQ ID NO: 670 - DNA, 1431 bp, synthetic construct
  misc_feature 1..1431: note = Synthetic
  source 1..1431: mol_type = other DNA
atcactaatctttgccccttcggggaagtatttaacgctactcgatttgctagcgtatatgcctggaaccggaagagaataagcaactgtgttgcagactatagcgtgctttacaattccgcatcctttagtaccttcaaatgttacggtgtgagccccaccaaactcaatgatctctgtttcacaaacgtgtacgcagatagtttcgttatacgcggggacgaagtacggcagatagcccctggccagacaggaaagatagccgattacaactacaaacttccagacgattttacagggtgtgtgatcgcttggaattcaaataacctggactccaaagtgggaggcaactataattacctgtaccgactgttccgcaaaagcaacttgaaacctttcgagcgagatatatcaaccgaaatctaccaagctggttctacaccttgtaatggtgtggagggatttaactgctacttccctcttcagtcctatggatttcagcctacaaatggagtcgggtatcaaccctatagagtcgtggtgttgtcatttgaacttctccatgcacctgctactgtctgtggtccaaaaaagtccactaatcttgtaaaaaacaaatgcgtgaacttcaatttcaatggcctcaccggaacaggtgttttgacagaatctaacaaaaaattccttcccttccagcaattcgggagagatggatccggcggcggcggtgacggtggtggcggctccggagacaagacccacacctgccccccttgtcctgcccctgagctgctgggcggaccctccgtgtttctgttcccccccaagcccaaggacaccctgatgatcagccggacccccgaggtcacctgcgtggtggtggacgtcagccacgaggacccagaggtcaagttcaattggtatgtggacggcgtggaggtgcacaacgccaagaccaagccccgggaggaacagtacaacagcacctaccgggtggtgtccgtgctgaccgtgctgcaccaggactggctgaacggcaaagaatacaagtgcaaggtgtccaacaaggccctgcctgcccccatcgagaaaaccatcagcaaggccaagggccagcccagagaaccccaggtgtacaccctgccccctagcagggaagagctgaccaagaaccaggtgtccctgacctgtctggtcaagggcttctaccccagcgatatcgccgtggagtgggagagcaacggccagcctgagaacaactacaagaccaccccccctgtgctggacagcgacggcagcttcttcctgtacagcaagctgaccgtggacaagagccggtggcagcagggcaacgtgtttagctgcagcgtgatgcacgaggccctgcacaaccactacacccagaagagcttaagcctgtcccctggcagt

SEQ ID NO: 671 - DNA, 1428 bp, synthetic construct
  misc_feature 1..1428: note = Synthetic
  source 1..1428: mol_type = other DNA
actaatctttgccccttcggggaagtatttaacgctactcgatttgctagcgtatatgcctggaaccggaagagaataagcaactgtgttgcagactatagcgtgctttacaattccgcatcctttagtaccttcaaatgttacggtgtgagccccaccaaactcaatgatctctgtttcacaaacgtgtacgcagatagtttcgttatacgcggggacgaagtacggcagatagcccctggccagacaggaaagatagccgattacaactacaaacttccagacgattttacagggtgtgtgatcgcttggaattcaaataacctggactccaaagtgggaggcaactataattacctgtaccgactgttccgcaaaagcaacttgaaacctttcgagcgagatatatcaaccgaaatctaccaagctggttctacaccttgtaatggtgtggagggatttaactgctacttccctcttcagtcctatggatttcagcctacaaatggagtcgggtatcaaccctatagagtcgtggtgttgtcatttgaacttctccatgcacctgctactgtctgtggtccaaaaaagtccactaatcttgtaaaaaacaaatgcgtgaacttcaatttcaatggcctcaccggaacaggtgttttgacagaatctaacaaaaaattccttcccttccagcaattcgggagagatggatccggcggcggcggtgacggtggtggcggctccggagacaagacccacacctgccccccttgtcctgcccctgagctgctgggcggaccctccgtgtttctgttcccccccaagcccaaggacaccctgatgatcagccggacccccgaggtcacctgcgtggtggtggacgtcagccacgaggacccagaggtcaagttcaattggtatgtggacggcgtggaggtgcacaacgccaagaccaagccccgggaggaacagtacaacagcacctaccgggtggtgtccgtgctgaccgtgctgcaccaggactggctgaacggcaaagaatacaagtgcaaggtgtccaacaaggccctgcctgcccccatcgagaaaaccatcagcaaggccaagggccagcccagagaaccccaggtgtacaccctgccccctagcagggaagagctgaccaagaaccaggtgtccctgacctgtctggtcaagggcttctaccccagcgatatcgccgtggagtgggagagcaacggccagcctgagaacaactacaagaccaccccccctgtgctggacagcgacggcagcttcttcctgtacagcaagctgaccgtggacaagagccggtggcagcagggcaacgtgtttagctgcagcgtgatgcacgaggccctgcacaaccactacacccagaagagcttaagcctgtcccctggcagt

SEQ ID NO: 672 - DNA, 1425 bp, synthetic construct
  misc_feature 1..1425: note = Synthetic
  source 1..1425: mol_type = other DNA
aatctttgccccttcggggaagtatttaacgctactcgatttgctagcgtatatgcctggaaccggaagagaataagcaactgtgttgcagactatagcgtgctttacaattccgcatcctttagtaccttcaaatgttacggtgtgagccccaccaaactcaatgatctctgtttcacaaacgtgtacgcagatagtttcgttatacgcggggacgaagtacggcagatagcccctggccagacaggaaagatagccgattacaactacaaacttccagacgattttacagggtgtgtgatcgcttggaattcaaataacctggactccaaagtgggaggcaactataattacctgtaccgactgttccgcaaaagcaacttgaaacctttcgagcgagatatatcaaccgaaatctaccaagctggttctacaccttgtaatggtgtggagggatttaactgctacttccctcttcagtcctatggatttcagcctacaaatggagtcgggtatcaaccctatagagtcgtggtgttgtcatttgaacttctccatgcacctgctactgtctgtggtccaaaaaagtccactaatcttgtaaaaaacaaatgcgtgaacttcaatttcaatggcctcaccggaacaggtgttttgacagaatctaacaaaaaattccttcccttccagcaattcgggagagatggatccggcggcggcggtgacggtggtggcggctccggagacaagacccacacctgccccccttgtcctgcccctgagctgctgggcggaccctccgtgtttctgttcccccccaagcccaaggacaccctgatgatcagccggacccccgaggtcacctgcgtggtggtggacgtcagccacgaggacccagaggtcaagttcaattggtatgtggacggcgtggaggtgcacaacgccaagaccaagccccgggaggaacagtacaacagcacctaccgggtggtgtccgtgctgaccgtgctgcaccaggactggctgaacggcaaagaatacaagtgcaaggtgtccaacaaggccctgcctgcccccatcgagaaaaccatcagcaaggccaagggccagcccagagaaccccaggtgtacaccctgccccctagcagggaagagctgaccaagaaccaggtgtccctgacctgtctggtcaagggcttctaccccagcgatatcgccgtggagtgggagagcaacggccagcctgagaacaactacaagaccaccccccctgtgctggacagcgacggcagcttcttcctgtacagcaagctgaccgtggacaagagccggtggcagcagggcaacgtgtttagctgcagcgtgatgcacgaggccctgcacaaccactacacccagaagagcttaagcctgtcccctggcagt

SEQ ID NO: 673 - DNA, 1422 bp, synthetic construct
  misc_feature 1..1422: note = Synthetic
  source 1..1422: mol_type = other DNA
ctttgccccttcggggaagtatttaacgctactcgatttgctagcgtatatgcctggaaccggaagagaataagcaactgtgttgcagactatagcgtgctttacaattccgcatcctttagtaccttcaaatgttacggtgtgagccccaccaaactcaatgatctctgtttcacaaacgtgtacgcagatagtttcgttatacgcggggacgaagtacggcagatagcccctggccagacaggaaagatagccgattacaactacaaacttccagacgattttacagggtgtgtgatcgcttggaattcaaataacctggactccaaagtgggaggcaactataattacctgtaccgactgttccgcaaaagcaacttgaaacctttcgagcgagatatatcaaccgaaatctaccaagctggttctacaccttgtaatggtgtggagggatttaactgctacttccctcttcagtcctatggatttcagcctacaaatggagtcgggtatcaaccctatagagtcgtggtgttgtcatttgaacttctccatgcacctgctactgtctgtggtccaaaaaagtccactaatcttgtaaaaaacaaatgcgtgaacttcaatttcaatggcctcaccggaacaggtgttttgacagaatctaacaaaaaattccttcccttccagcaattcgggagagatggatccggcggcggcggtgacggtggtggcggctccggagacaagacccacacctgccccccttgtcctgcccctgagctgctgggcggaccctccgtgtttctgttcccccccaagcccaaggacaccctgatgatcagccggacccccgaggtcacctgcgtggtggtggacgtcagccacgaggacccagaggtcaagttcaattggtatgtggacggcgtggaggtgcacaacgccaagaccaagccccgggaggaacagtacaacagcacctaccgggtggtgtccgtgctgaccgtgctgcaccaggactggctgaacggcaaagaatacaagtgcaaggtgtccaacaaggccctgcctgcccccatcgagaaaaccatcagcaaggccaagggccagcccagagaaccccaggtgtacaccctgccccctagcagggaagagctgaccaagaaccaggtgtccctgacctgtctggtcaagggcttctaccccagcgatatcgccgtggagtgggagagcaacggccagcctgagaacaactacaagaccaccccccctgtgctggacagcgacggcagcttcttcctgtacagcaagctgaccgtggacaagagccggtggcagcagggcaacgtgtttagctgcagcgtgatgcacgaggccctgcacaaccactacacccagaagagcttaagcctgtcccctggcagt

SEQ ID NO: 674 - DNA, 1419 bp, synthetic construct
  misc_feature 1..1419: note = Synthetic
  source 1..1419: mol_type = other DNA
tgccccttcggggaagtatttaacgctactcgatttgctagcgtatatgcctggaaccggaagagaataagcaactgtgttgcagactatagcgtgctttacaattccgcatcctttagtaccttcaaatgttacggtgtgagccccaccaaactcaatgatctctgtttcacaaacgtgtacgcagatagtttcgttatacgcggggacgaagtacggcagatagcccctggccagacaggaaagatagccgattacaactacaaacttccagacgattttacagggtgtgtgatcgcttggaattcaaataacctggactccaaagtgggaggcaactataattacctgtaccgactgttccgcaaaagcaacttgaaacctttcgagcgagatatatcaaccgaaatctaccaagctggttctacaccttgtaatggtgtggagggatttaactgctacttccctcttcagtcctatggatttcagcctacaaatggagtcgggtatcaaccctatagagtcgtggtgttgtcatttgaacttctccatgcacctgctactgtctgtggtccaaaaaagtccactaatcttgtaaaaaacaaatgcgtgaacttcaatttcaatggcctcaccggaacaggtgttttgacagaatctaacaaaaaattccttcccttccagcaattcgggagagatggatccggcggcggcggtgacggtggtggcggctccggagacaagacccacacctgccccccttgtcctgcccctgagctgctgggcggaccctccgtgtttctgttcccccccaagcccaaggacaccctgatgatcagccggacccccgaggtcacctgcgtggtggtggacgtcagccacgaggacccagaggtcaagttcaattggtatgtggacggcgtggaggtgcacaacgccaagaccaagccccgggaggaacagtacaacagcacctaccgggtggtgtccgtgctgaccgtgctgcaccaggactggctgaacggcaaagaatacaagtgcaaggtgtccaacaaggccctgcctgcccccatcgagaaaaccatcagcaaggccaagggccagcccagagaaccccaggtgtacaccctgccccctagcagggaagagctgaccaagaaccaggtgtccctgacctgtctggtcaagggcttctaccccagcgatatcgccgtggagtgggagagcaacggccagcctgagaacaactacaagaccaccccccctgtgctggacagcgacggcagcttcttcctgtacagcaagctgaccgtggacaagagccggtggcagcagggcaacgtgtttagctgcagcgtgatgcacgaggccctgcacaaccactacacccagaagagcttaagcctgtcccctggcagt

SEQ ID NO: 675 - DNA, 1416 bp, synthetic construct
  misc_feature 1..1416: note = Synthetic
  source 1..1416: mol_type = other DNA
cccttcggggaagtatttaacgctactcgatttgctagcgtatatgcctggaaccggaagagaataagcaactgtgttgcagactatagcgtgctttacaattccgcatcctttagtaccttcaaatgttacggtgtgagccccaccaaactcaatgatctctgtttcacaaacgtgtacgcagatagtttcgttatacgcggggacgaagtacggcagatagcccctggccagacaggaaagatagccgattacaactacaaacttccagacgattttacagggtgtgtgatcgcttggaattcaaataacctggactccaaagtgggaggcaactataattacctgtaccgactgttccgcaaaagcaacttgaaacctttcgagcgagatatatcaaccgaaatctaccaagctggttctacaccttgtaatggtgtggagggatttaactgctacttccctcttcagtcctatggatttcagcctacaaatggagtcgggtatcaaccctatagagtcgtggtgttgtcatttgaacttctccatgcacctgctactgtctgtggtccaaaaaagtccactaatcttgtaaaaaacaaatgcgtgaacttcaatttcaatggcctcaccggaacaggtgttttgacagaatctaacaaaaaattccttcccttccagcaattcgggagagatggatccggcggcggcggtgacggtggtggcggctccggagacaagacccacacctgccccccttgtcctgcccctgagctgctgggcggaccctccgtgtttctgttcccccccaagcccaaggacaccctgatgatcagccggacccccgaggtcacctgcgtggtggtggacgtcagccacgaggacccagaggtcaagttcaattggtatgtggacggcgtggaggtgcacaacgccaagaccaagccccgggaggaacagtacaacagcacctaccgggtggtgtccgtgctgaccgtgctgcaccaggactggctgaacggcaaagaatacaagtgcaaggtgtccaacaaggccctgcctgcccccatcgagaaaaccatcagcaaggccaagggccagcccagagaaccccaggtgtacaccctgccccctagcagggaagagctgaccaagaaccaggtgtccctgacctgtctggtcaagggcttctaccccagcgatatcgccgtggagtgggagagcaacggccagcctgagaacaactacaagaccaccccccctgtgctggacagcgacggcagcttcttcctgtacagcaagctgaccgtggacaagagccggtggcagcagggcaacgtgtttagctgcagcgtgatgcacgaggccctgcacaaccactacacccagaagagcttaagcctgtcccctggcagt

SEQ ID NO: 676 - DNA, 1413 bp, synthetic construct
  misc_feature 1..1413: note = Synthetic
  source 1..1413: mol_type = other DNA
ttcggggaagtatttaacgctactcgatttgctagcgtatatgcctggaaccggaagagaataagcaactgtgttgcagactatagcgtgctttacaattccgcatcctttagtaccttcaaatgttacggtgtgagccccaccaaactcaatgatctctgtttcacaaacgtgtacgcagatagtttcgttatacgcggggacgaagtacggcagatagcccctggccagacaggaaagatagccgattacaactacaaacttccagacgattttacagggtgtgtgatcgcttggaattcaaataacctggactccaaagtgggaggcaactataattacctgtaccgactgttccgcaaaagcaacttgaaacctttcgagcgagatatatcaaccgaaatctaccaagctggttctacaccttgtaatggtgtggagggatttaactgctacttccctcttcagtcctatggatttcagcctacaaatggagtcgggtatcaaccctatagagtcgtggtgttgtcatttgaacttctccatgcacctgctactgtctgtggtccaaaaaagtccactaatcttgtaaaaaacaaatgcgtgaacttcaatttcaatggcctcaccggaacaggtgttttgacagaatctaacaaaaaattccttcccttccagcaattcgggagagatggatccggcggcggcggtgacggtggtggcggctccggagacaagacccacacctgccccccttgtcctgcccctgagctgctgggcggaccctccgtgtttctgttcccccccaagcccaaggacaccctgatgatcagccggacccccgaggtcacctgcgtggtggtggacgtcagccacgaggacccagaggtcaagttcaattggtatgtggacggcgtggaggtgcacaacgccaagaccaagccccgggaggaacagtacaacagcacctaccgggtggtgtccgtgctgaccgtgctgcaccaggactggctgaacggcaaagaatacaagtgcaaggtgtccaacaaggccctgcctgcccccatcgagaaaaccatcagcaaggccaagggccagcccagagaaccccaggtgtacaccctgccccctagcagggaagagctgaccaagaaccaggtgtccctgacctgtctggtcaagggcttctaccccagcgatatcgccgtggagtgggagagcaacggccagcctgagaacaactacaagaccaccccccctgtgctggacagcgacggcagcttcttcctgtacagcaagctgaccgtggacaagagccggtggcagcagggcaacgtgtttagctgcagcgtgatgcacgaggccctgcacaaccactacacccagaagagcttaagcctgtcccctggcagt

SEQ ID NO: 677 - DNA, 1410 bp, synthetic construct
  misc_feature 1..1410: note = Synthetic
  source 1..1410: mol_type = other DNA
ggggaagtatttaacgctactcgatttgctagcgtatatgcctggaaccggaagagaataagcaactgtgttgcagactatagcgtgctttacaattccgcatcctttagtaccttcaaatgttacggtgtgagccccaccaaactcaatgatctctgtttcacaaacgtgtacgcagatagtttcgttatacgcggggacgaagtacggcagatagcccctggccagacaggaaagatagccgattacaactacaaacttccagacgattttacagggtgtgtgatcgcttggaattcaaataacctggactccaaagtgggaggcaactataattacctgtaccgactgttccgcaaaagcaacttgaaacctttcgagcgagatatatcaaccgaaatctaccaagctggttctacaccttgtaatggtgtggagggatttaactgctacttccctcttcagtcctatggatttcagcctacaaatggagtcgggtatcaaccctatagagtcgtggtgttgtcatttgaacttctccatgcacctgctactgtctgtggtccaaaaaagtccactaatcttgtaaaaaacaaatgcgtgaacttcaatttcaatggcctcaccggaacaggtgttttgacagaatctaacaaaaaattccttcccttccagcaattcgggagagatggatccggcggcggcggtgacggtggtggcggctccggagacaagacccacacctgccccccttgtcctgcccctgagctgctgggcggaccctccgtgtttctgttcccccccaagcccaaggacaccctgatgatcagccggacccccgaggtcacctgcgtggtggtggacgtcagccacgaggacccagaggtcaagttcaattggtatgtggacggcgtggaggtgcacaacgccaagaccaagccccgggaggaacagtacaacagcacctaccgggtggtgtccgtgctgaccgtgctgcaccaggactggctgaacggcaaagaatacaagtgcaaggtgtccaacaaggccctgcctgcccccatcgagaaaaccatcagcaaggccaagggccagcccagagaaccccaggtgtacaccctgccccctagcagggaagagctgaccaagaaccaggtgtccctgacctgtctggtcaagggcttctaccccagcgatatcgccgtggagtgggagagcaacggccagcctgagaacaactacaagaccaccccccctgtgctggacagcgacggcagcttcttcctgtacagcaagctgaccgtggacaagagccggtggcagcagggcaacgtgtttagctgcagcgtgatgcacgaggccctgcacaaccactacacccagaagagcttaagcctgtcccctggcagt

SEQ ID NO: 678 - DNA, 1407 bp, synthetic construct
  misc_feature 1..1407: note = Synthetic
  source 1..1407: mol_type = other DNA
gaagtatttaacgctactcgatttgctagcgtatatgcctggaaccggaagagaataagcaactgtgttgcagactatagcgtgctttacaattccgcatcctttagtaccttcaaatgttacggtgtgagccccaccaaactcaatgatctctgtttcacaaacgtgtacgcagatagtttcgttatacgcggggacgaagtacggcagatagcccctggccagacaggaaagatagccgattacaactacaaacttccagacgattttacagggtgtgtgatcgcttggaattcaaataacctggactccaaagtgggaggcaactataattacctgtaccgactgttccgcaaaagcaacttgaaacctttcgagcgagatatatcaaccgaaatctaccaagctggttctacaccttgtaatggtgtggagggatttaactgctacttccctcttcagtcctatggatttcagcctacaaatggagtcgggtatcaaccctatagagtcgtggtgttgtcatttgaacttctccatgcacctgctactgtctgtggtccaaaaaagtccactaatcttgtaaaaaacaaatgcgtgaacttcaatttcaatggcctcaccggaacaggtgttttgacagaatctaacaaaaaattccttcccttccagcaattcgggagagatggatccggcggcggcggtgacggtggtggcggctccggagacaagacccacacctgccccccttgtcctgcccctgagctgctgggcggaccctccgtgtttctgttcccccccaagcccaaggacaccctgatgatcagccggacccccgaggtcacctgcgtggtggtggacgtcagccacgaggacccagaggtcaagttcaattggtatgtggacggcgtggaggtgcacaacgccaagaccaagccccgggaggaacagtacaacagcacctaccgggtggtgtccgtgctgaccgtgctgcaccaggactggctgaacggcaaagaatacaagtgcaaggtgtccaacaaggccctgcctgcccccatcgagaaaaccatcagcaaggccaagggccagcccagagaaccccaggtgtacaccctgccccctagcagggaagagctgaccaagaaccaggtgtccctgacctgtctggtcaagggcttctaccccagcgatatcgccgtggagtgggagagcaacggccagcctgagaacaactacaagaccaccccccctgtgctggacagcgacggcagcttcttcctgtacagcaagctgaccgtggacaagagccggtggcagcagggcaacgtgtttagctgcagcgtgatgcacgaggccctgcacaaccactacacccagaagagcttaagcctgtcccctggcagt

SEQ ID NO: 679 - DNA, 1404 bp, synthetic construct
  misc_feature 1..1404: note = Synthetic
  source 1..1404: mol_type = other DNA
gtatttaacgctactcgatttgctagcgtatatgcctggaaccggaagagaataagcaactgtgttgcagactatagcgtgctttacaattccgcatcctttagtaccttcaaatgttacggtgtgagccccaccaaactcaatgatctctgtttcacaaacgtgtacgcagatagtttcgttatacgcggggacgaagtacggcagatagcccctggccagacaggaaagatagccgattacaactacaaacttccagacgattttacagggtgtgtgatcgcttggaattcaaataacctggactccaaagtgggaggcaactataattacctgtaccgactgttccgcaaaagcaacttgaaacctttcgagcgagatatatcaaccgaaatctaccaagctggttctacaccttgtaatggtgtggagggatttaactgctacttccctcttcagtcctatggatttcagcctacaaatggagtcgggtatcaaccctatagagtcgtggtgttgtcatttgaacttctccatgcacctgctactgtctgtggtccaaaaaagtccactaatcttgtaaaaaacaaatgcgtgaacttcaatttcaatggcctcaccggaacaggtgttttgacagaatctaacaaaaaattccttcccttccagcaattcgggagagatggatccggcggcggcggtgacggtggtggcggctccggagacaagacccacacctgccccccttgtcctgcccctgagctgctgggcggaccctccgtgtttctgttcccccccaagcccaaggacaccctgatgatcagccggacccccgaggtcacctgcgtggtggtggacgtcagccacgaggacccagaggtcaagttcaattggtatgtggacggcgtggaggtgcacaacgccaagaccaagccccgggaggaacagtacaacagcacctaccgggtggtgtccgtgctgaccgtgctgcaccaggactggctgaacggcaaagaatacaagtgcaaggtgtccaacaaggccctgcctgcccccatcgagaaaaccatcagcaaggccaagggccagcccagagaaccccaggtgtacaccctgccccctagcagggaagagctgaccaagaaccaggtgtccctgacctgtctggtcaagggcttctaccccagcgatatcgccgtggagtgggagagcaacggccagcctgagaacaactacaagaccaccccccctgtgctggacagcgacggcagcttcttcctgtacagcaagctgaccgtggacaagagccggtggcagcagggcaacgtgtttagctgcagcgtgatgcacgaggccctgcacaaccactacacccagaagagcttaagcctgtcccctggcagt

SEQ ID NO: 680 - DNA, 1401 bp, synthetic construct
  misc_feature 1..1401: note = Synthetic
  source 1..1401: mol_type = other DNA
tttaacgctactcgatttgctagcgtatatgcctggaaccggaagagaataagcaactgtgttgcagactatagcgtgctttacaattccgcatcctttagtaccttcaaatgttacggtgtgagccccaccaaactcaatgatctctgtttcacaaacgtgtacgcagatagtttcgttatacgcggggacgaagtacggcagatagcccctggccagacaggaaagatagccgattacaactacaaacttccagacgattttacagggtgtgtgatcgcttggaattcaaataacctggactccaaagtgggaggcaactataattacctgtaccgactgttccgcaaaagcaacttgaaacctttcgagcgagatatatcaaccgaaatctaccaagctggttctacaccttgtaatggtgtggagggatttaactgctacttccctcttcagtcctatggatttcagcctacaaatggagtcgggtatcaaccctatagagtcgtggtgttgtcatttgaacttctccatgcacctgctactgtctgtggtccaaaaaagtccactaatcttgtaaaaaacaaatgcgtgaacttcaatttcaatggcctcaccggaacaggtgttttgacagaatctaacaaaaaattccttcccttccagcaattcgggagagatggatccggcggcggcggtgacggtggtggcggctccggagacaagacccacacctgccccccttgtcctgcccctgagctgctgggcggaccctccgtgtttctgttcccccccaagcccaaggacaccctgatgatcagccggacccccgaggtcacctgcgtggtggtggacgtcagccacgaggacccagaggtcaagttcaattggtatgtggacggcgtggaggtgcacaacgccaagaccaagccccgggaggaacagtacaacagcacctaccgggtggtgtccgtgctgaccgtgctgcaccaggactggctgaacggcaaagaatacaagtgcaaggtgtccaacaaggccctgcctgcccccatcgagaaaaccatcagcaaggccaagggccagcccagagaaccccaggtgtacaccctgccccctagcagggaagagctgaccaagaaccaggtgtccctgacctgtctggtcaagggcttctaccccagcgatatcgccgtggagtgggagagcaacggccagcctgagaacaactacaagaccaccccccctgtgctggacagcgacggcagcttcttcctgtacagcaagctgaccgtggacaagagccggtggcagcagggcaacgtgtttagctgcagcgtgatgcacgaggccctgcacaaccactacacccagaagagcttaagcctgtcccctggcagt

SEQ ID NO: 681 - DNA, 1398 bp, synthetic construct
  misc_feature 1..1398: note = Synthetic
  source 1..1398: mol_type = other DNA
aacgctactcgatttgctagcgtatatgcctggaaccggaagagaataagcaactgtgttgcagactatagcgtgctttacaattccgcatcctttagtaccttcaaatgttacggtgtgagccccaccaaactcaatgatctctgtttcacaaacgtgtacgcagatagtttcgttatacgcggggacgaagtacggcagatagcccctggccagacaggaaagatagccgattacaactacaaacttccagacgattttacagggtgtgtgatcgcttggaattcaaataacctggactccaaagtgggaggcaactataattacctgtaccgactgttccgcaaaagcaacttgaaacctttcgagcgagatatatcaaccgaaatctaccaagctggttctacaccttgtaatggtgtggagggatttaactgctacttccctcttcagtcctatggatttcagcctacaaatggagtcgggtatcaaccctatagagtcgtggtgttgtcatttgaacttctccatgcacctgctactgtctgtggtccaaaaaagtccactaatcttgtaaaaaacaaatgcgtgaacttcaatttcaatggcctcaccggaacaggtgttttgacagaatctaacaaaaaattccttcccttccagcaattcgggagagatggatccggcggcggcggtgacggtggtggcggctccggagacaagacccacacctgccccccttgtcctgcccctgagctgctgggcggaccctccgtgtttctgttcccccccaagcccaaggacaccctgatgatcagccggacccccgaggtcacctgcgtggtggtggacgtcagccacgaggacccagaggtcaagttcaattggtatgtggacggcgtggaggtgcacaacgccaagaccaagccccgggaggaacagtacaacagcacctaccgggtggtgtccgtgctgaccgtgctgcaccaggactggctgaacggcaaagaatacaagtgcaaggtgtccaacaaggccctgcctgcccccatcgagaaaaccatcagcaaggccaagggccagcccagagaaccccaggtgtacaccctgccccctagcagggaagagctgaccaagaaccaggtgtccctgacctgtctggtcaagggcttctaccccagcgatatcgccgtggagtgggagagcaacggccagcctgagaacaactacaagaccaccccccctgtgctggacagcgacggcagcttcttcctgtacagcaagctgaccgtggacaagagccggtggcagcagggcaacgtgtttagctgcagcgtgatgcacgaggccctgcacaaccactacacccagaagagcttaagcctgtcccctggcagt

SEQ ID NO: 682 - DNA, 1395 bp, synthetic construct
  misc_feature 1..1395: note = Synthetic
  source 1..1395: mol_type = other DNA
gctactcgatttgctagcgtatatgcctggaaccggaagagaataagcaactgtgttgcagactatagcgtgctttacaattccgcatcctttagtaccttcaaatgttacggtgtgagccccaccaaactcaatgatctctgtttcacaaacgtgtacgcagatagtttcgttatacgcggggacgaagtacggcagatagcccctggccagacaggaaagatagccgattacaactacaaacttccagacgattttacagggtgtgtgatcgcttggaattcaaataacctggactccaaagtgggaggcaactataattacctgtaccgactgttccgcaaaagcaacttgaaacctttcgagcgagatatatcaaccgaaatctaccaagctggttctacaccttgtaatggtgtggagggatttaactgctacttccctcttcagtcctatggatttcagcctacaaatggagtcgggtatcaaccctatagagtcgtggtgttgtcatttgaacttctccatgcacctgctactgtctgtggtccaaaaaagtccactaatcttgtaaaaaacaaatgcgtgaacttcaatttcaatggcctcaccggaacaggtgttttgacagaatctaacaaaaaattccttcccttccagcaattcgggagagatggatccggcggcggcggtgacggtggtggcggctccggagacaagacccacacctgccccccttgtcctgcccctgagctgctgggcggaccctccgtgtttctgttcccccccaagcccaaggacaccctgatgatcagccggacccccgaggtcacctgcgtggtggtggacgtcagccacgaggacccagaggtcaagttcaattggtatgtggacggcgtggaggtgcacaacgccaagaccaagccccgggaggaacagtacaacagcacctaccgggtggtgtccgtgctgaccgtgctgcaccaggactggctgaacggcaaagaatacaagtgcaaggtgtccaacaaggccctgcctgcccccatcgagaaaaccatcagcaaggccaagggccagcccagagaaccccaggtgtacaccctgccccctagcagggaagagctgaccaagaaccaggtgtccctgacctgtctggtcaagggcttctaccccagcgatatcgccgtggagtgggagagcaacggccagcctgagaacaactacaagaccaccccccctgtgctggacagcgacggcagcttcttcctgtacagcaagctgaccgtggacaagagccggtggcagcagggcaacgtgtttagctgcagcgtgatgcacgaggccctgcacaaccactacacccagaagagcttaagcctgtcccctggcagt

SEQ ID NO: 683 - DNA, 1392 bp, synthetic construct
  misc_feature 1..1392: note = Synthetic
  source 1..1392: mol_type = other DNA
actcgatttgctagcgtatatgcctggaaccggaagagaataagcaactgtgttgcagactatagcgtgctttacaattccgcatcctttagtaccttcaaatgttacggtgtgagccccaccaaactcaatgatctctgtttcacaaacgtgtacgcagatagtttcgttatacgcggggacgaagtacggcagatagcccctggccagacaggaaagatagccgattacaactacaaacttccagacgattttacagggtgtgtgatcgcttggaattcaaataacctggactccaaagtgggaggcaactataattacctgtaccgactgttccgcaaaagcaacttgaaacctttcgagcgagatatatcaaccgaaatctaccaagctggttctacaccttgtaatggtgtggagggatttaactgctacttccctcttcagtcctatggatttcagcctacaaatggagtcgggtatcaaccctatagagtcgtggtgttgtcatttgaacttctccatgcacctgctactgtctgtggtccaaaaaagtccactaatcttgtaaaaaacaaatgcgtgaacttcaatttcaatggcctcaccggaacaggtgttttgacagaatctaacaaaaaattccttcccttccagcaattcgggagagatggatccggcggcggcggtgacggtggtggcggctccggagacaagacccacacctgccccccttgtcctgcccctgagctgctgggcggaccctccgtgtttctgttcccccccaagcccaaggacaccctgatgatcagccggacccccgaggtcacctgcgtggtggtggacgtcagccacgaggacccagaggtcaagttcaattggtatgtggacggcgtggaggtgcacaacgccaagaccaagccccgggaggaacagtacaacagcacctaccgggtggtgtccgtgctgaccgtgctgcaccaggactggctgaacggcaaagaatacaagtgcaaggtgtccaacaaggccctgcctgcccccatcgagaaaaccatcagcaaggccaagggccagcccagagaaccccaggtgtacaccctgccccctagcagggaagagctgaccaagaaccaggtgtccctgacctgtctggtcaagggcttctaccccagcgatatcgccgtggagtgggagagcaacggccagcctgagaacaactacaagaccaccccccctgtgctggacagcgacggcagcttcttcctgtacagcaagctgaccgtggacaagagccggtggcagcagggcaacgtgtttagctgcagcgtgatgcacgaggccctgcacaaccactacacccagaagagcttaagcctgtcccctggcagt

SEQ ID NO: 684 - DNA, 1389 bp, synthetic construct
  misc_feature 1..1389: note = Synthetic
  source 1..1389: mol_type = other DNA
cgatttgctagcgtatatgcctggaaccggaagagaataagcaactgtgttgcagactatagcgtgctttacaattccgcatcctttagtaccttcaaatgttacggtgtgagccccaccaaactcaatgatctctgtttcacaaacgtgtacgcagatagtttcgttatacgcggggacgaagtacggcagatagcccctggccagacaggaaagatagccgattacaactacaaacttccagacgattttacagggtgtgtgatcgcttggaattcaaataacctggactccaaagtgggaggcaactataattacctgtaccgactgttccgcaaaagcaacttgaaacctttcgagcgagatatatcaaccgaaatctaccaagctggttctacaccttgtaatggtgtggagggatttaactgctacttccctcttcagtcctatggatttcagcctacaaatggagtcgggtatcaaccctatagagtcgtggtgttgtcatttgaacttctccatgcacctgctactgtctgtggtccaaaaaagtccactaatcttgtaaaaaacaaatgcgtgaacttcaatttcaatggcctcaccggaacaggtgttttgacagaatctaacaaaaaattccttcccttccagcaattcgggagagatggatccggcggcggcggtgacggtggtggcggctccggagacaagacccacacctgccccccttgtcctgcccctgagctgctgggcggaccctccgtgtttctgttcccccccaagcccaaggacaccctgatgatcagccggacccccgaggtcacctgcgtggtggtggacgtcagccacgaggacccagaggtcaagttcaattggtatgtggacggcgtggaggtgcacaacgccaagaccaagccccgggaggaacagtacaacagcacctaccgggtggtgtccgtgctgaccgtgctgcaccaggactggctgaacggcaaagaatacaagtgcaaggtgtccaacaaggccctgcctgcccccatcgagaaaaccatcagcaaggccaagggccagcccagagaaccccaggtgtacaccctgccccctagcagggaagagctgaccaagaaccaggtgtccctgacctgtctggtcaagggcttctaccccagcgatatcgccgtggagtgggagagcaacggccagcctgagaacaactacaagaccaccccccctgtgctggacagcgacggcagcttcttcctgtacagcaagctgaccgtggacaagagccggtggcagcagggcaacgtgtttagctgcagcgtgatgcacgaggccctgcacaaccactacacccagaagagcttaagcctgtcccctggcagt

SEQ ID NO: 685 - DNA, 1386 bp, synthetic construct
  misc_feature 1..1386: note = Synthetic
  source 1..1386: mol_type = other DNA
tttgctagcgtatatgcctggaaccggaagagaataagcaactgtgttgcagactatagcgtgctttacaattccgcatcctttagtaccttcaaatgttacggtgtgagccccaccaaactcaatgatctctgtttcacaaacgtgtacgcagatagtttcgttatacgcggggacgaagtacggcagatagcccctggccagacaggaaagatagccgattacaactacaaacttccagacgattttacagggtgtgtgatcgcttggaattcaaataacctggactccaaagtgggaggcaactataattacctgtaccgactgttccgcaaaagcaacttgaaacctttcgagcgagatatatcaaccgaaatctaccaagctggttctacaccttgtaatggtgtggagggatttaactgctacttccctcttcagtcctatggatttcagcctacaaatggagtcgggtatcaaccctatagagtcgtggtgttgtcatttgaacttctccatgcacctgctactgtctgtggtccaaaaaagtccactaatcttgtaaaaaacaaatgcgtgaacttcaatttcaatggcctcaccggaacaggtgttttgacagaatctaacaaaaaattccttcccttccagcaattcgggagagatggatccggcggcggcggtgacggtggtggcggctccggagacaagacccacacctgccccccttgtcctgcccctgagctgctgggcggaccctccgtgtttctgttcccccccaagcccaaggacaccctgatgatcagccggacccccgaggtcacctgcgtggtggtggacgtcagccacgaggacccagaggtcaagttcaattggtatgtggacggcgtggaggtgcacaacgccaagaccaagccccgggaggaacagtacaacagcacctaccgggtggtgtccgtgctgaccgtgctgcaccaggactggctgaacggcaaagaatacaagtgcaaggtgtccaacaaggccctgcctgcccccatcgagaaaaccatcagcaaggccaagggccagcccagagaaccccaggtgtacaccctgccccctagcagggaagagctgaccaagaaccaggtgtccctgacctgtctggtcaagggcttctaccccagcgatatcgccgtggagtgggagagcaacggccagcctgagaacaactacaagaccaccccccctgtgctggacagcgacggcagcttcttcctgtacagcaagctgaccgtggacaagagccggtggcagcagggcaacgtgtttagctgcagcgtgatgcacgaggccctgcacaaccactacacccagaagagcttaagcctgtcccctggcagt

SEQ ID NO: 686 - DNA, 1383 bp, synthetic construct
  misc_feature 1..1383: note = Synthetic
  source 1..1383: mol_type = other DNA
gctagcgtatatgcctggaaccggaagagaataagcaactgtgttgcagactatagcgtgctttacaattccgcatcctttagtaccttcaaatgttacggtgtgagccccaccaaactcaatgatctctgtttcacaaacgtgtacgcagatagtttcgttatacgcggggacgaagtacggcagatagcccctggccagacaggaaagatagccgattacaactacaaacttccagacgattttacagggtgtgtgatcgcttggaattcaaataacctggactccaaagtgggaggcaactataattacctgtaccgactgttccgcaaaagcaacttgaaacctttcgagcgagatatatcaaccgaaatctaccaagctggttctacaccttgtaatggtgtggagggatttaactgctacttccctcttcagtcctatggatttcagcctacaaatggagtcgggtatcaaccctatagagtcgtggtgttgtcatttgaacttctccatgcacctgctactgtctgtggtccaaaaaagtccactaatcttgtaaaaaacaaatgcgtgaacttcaatttcaatggcctcaccggaacaggtgttttgacagaatctaacaaaaaattccttcccttccagcaattcgggagagatggatccggcggcggcggtgacggtggtggcggctccggagacaagacccacacctgccccccttgtcctgcccctgagctgctgggcggaccctccgtgtttctgttcccccccaagcccaaggacaccctgatgatcagccggacccccgaggtcacctgcgtggtggtggacgtcagccacgaggacccagaggtcaagttcaattggtatgtggacggcgtggaggtgcacaacgccaagaccaagccccgggaggaacagtacaacagcacctaccgggtggtgtccgtgctgaccgtgctgcaccaggactggctgaacggcaaagaatacaagtgcaaggtgtccaacaaggccctgcctgcccccatcgagaaaaccatcagcaaggccaagggccagcccagagaaccccaggtgtacaccctgccccctagcagggaagagctgaccaagaaccaggtgtccctgacctgtctggtcaagggcttctaccccagcgatatcgccgtggagtgggagagcaacggccagcctgagaacaactacaagaccaccccccctgtgctggacagcgacggcagcttcttcctgtacagcaagctgaccgtggacaagagccggtggcagcagggcaacgtgtttagctgcagcgtgatgcacgaggccctgcacaaccactacacccagaagagcttaagcctgtcccctggcagt

SEQ ID NO: 687 - DNA, 1380 bp, synthetic construct
  misc_feature 1..1380: note = Synthetic
  source 1..1380: mol_type = other DNA
agcgtatatgcctggaaccggaagagaataagcaactgtgttgcagactatagcgtgctttacaattccgcatcctttagtaccttcaaatgttacggtgtgagccccaccaaactcaatgatctctgtttcacaaacgtgtacgcagatagtttcgttatacgcggggacgaagtacggcagatagcccctggccagacaggaaagatagccgattacaactacaaacttccagacgattttacagggtgtgtgatcgcttggaattcaaataacctggactccaaagtgggaggcaactataattacctgtaccgactgttccgcaaaagcaacttgaaacctttcgagcgagatatatcaaccgaaatctaccaagctggttctacaccttgtaatggtgtggagggatttaactgctacttccctcttcagtcctatggatttcagcctacaaatggagtcgggtatcaaccctatagagtcgtggtgttgtcatttgaacttctccatgcacctgctactgtctgtggtccaaaaaagtccactaatcttgtaaaaaacaaatgcgtgaacttcaatttcaatggcctcaccggaacaggtgttttgacagaatctaacaaaaaattccttcccttccagcaattcgggagagatggatccggcggcggcggtgacggtggtggcggctccggagacaagacccacacctgccccccttgtcctgcccctgagctgctgggcggaccctccgtgtttctgttcccccccaagcccaaggacaccctgatgatcagccggacccccgaggtcacctgcgtggtggtggacgtcagccacgaggacccagaggtcaagttcaattggtatgtggacggcgtggaggtgcacaacgccaagaccaagccccgggaggaacagtacaacagcacctaccgggtggtgtccgtgctgaccgtgctgcaccaggactggctgaacggcaaagaatacaagtgcaaggtgtccaacaaggccctgcctgcccccatcgagaaaaccatcagcaaggccaagggccagcccagagaaccccaggtgtacaccctgccccctagcagggaagagctgaccaagaaccaggtgtccctgacctgtctggtcaagggcttctaccccagcgatatcgccgtggagtgggagagcaacggccagcctgagaacaactacaagaccaccccccctgtgctggacagcgacggcagcttcttcctgtacagcaagctgaccgtggacaagagccggtggcagcagggcaacgtgtttagctgcagcgtgatgcacgaggccctgcacaaccactacacccagaagagcttaagcctgtcccctggcagt

SEQ ID NO: 688 - DNA, 1377 bp, synthetic construct
  misc_feature 1..1377: note = Synthetic
  source 1..1377: mol_type = other DNA
gtatatgcctggaaccggaagagaataagcaactgtgttgcagactatagcgtgctttacaattccgcatcctttagtaccttcaaatgttacggtgtgagccccaccaaactcaatgatctctgtttcacaaacgtgtacgcagatagtttcgttatacgcggggacgaagtacggcagatagcccctggccagacaggaaagatagccgattacaactacaaacttccagacgattttacagggtgtgtgatcgcttggaattcaaataacctggactccaaagtgggaggcaactataattacctgtaccgactgttccgcaaaagcaacttgaaacctttcgagcgagatatatcaaccgaaatctaccaagctggttctacaccttgtaatggtgtggagggatttaactgctacttccctcttcagtcctatggatttcagcctacaaatggagtcgggtatcaaccctatagagtcgtggtgttgtcatttgaacttctccatgcacctgctactgtctgtggtccaaaaaagtccactaatcttgtaaaaaacaaatgcgtgaacttcaatttcaatggcctcaccggaacaggtgttttgacagaatctaacaaaaaattccttcccttccagcaattcgggagagatggatccggcggcggcggtgacggtggtggcggctccggagacaagacccacacctgccccccttgtcctgcccctgagctgctgggcggaccctccgtgtttctgttcccccccaagcccaaggacaccctgatgatcagccggacccccgaggtcacctgcgtggtggtggacgtcagccacgaggacccagaggtcaagttcaattggtatgtggacggcgtggaggtgcacaacgccaagaccaagccccgggaggaacagtacaacagcacctaccgggtggtgtccgtgctgaccgtgctgcaccaggactggctgaacggcaaagaatacaagtgcaaggtgtccaacaaggccctgcctgcccccatcgagaaaaccatcagcaaggccaagggccagcccagagaaccccaggtgtacaccctgccccctagcagggaagagctgaccaagaaccaggtgtccctgacctgtctggtcaagggcttctaccccagcgatatcgccgtggagtgggagagcaacggccagcctgagaacaactacaagaccaccccccctgtgctggacagcgacggcagcttcttcctgtacagcaagctgaccgtggacaagagccggtggcagcagggcaacgtgtttagctgcagcgtgatgcacgaggccctgcacaaccactacacccagaagagcttaagcctgtcccctggcagt

SEQ ID NO: 689 - DNA, 1374 bp, synthetic construct
  misc_feature 1..1374: note = Synthetic
  source 1..1374: mol_type = other DNA
tatgcctggaaccggaagagaataagcaactgtgttgcagactatagcgtgctttacaattccgcatcctttagtaccttcaaatgttacggtgtgagccccaccaaactcaatgatctctgtttcacaaacgtgtacgcagatagtttcgttatacgcggggacgaagtacggcagatagcccctggccagacaggaaagatagccgattacaactacaaacttccagacgattttacagggtgtgtgatcgcttggaattcaaataacctggactccaaagtgggaggcaactataattacctgtaccgactgttccgcaaaagcaacttgaaacctttcgagcgagatatatcaaccgaaatctaccaagctggttctacaccttgtaatggtgtggagggatttaactgctacttccctcttcagtcctatggatttcagcctacaaatggagtcgggtatcaaccctatagagtcgtggtgttgtcatttgaacttctccatgcacctgctactgtctgtggtccaaaaaagtccactaatcttgtaaaaaacaaatgcgtgaacttcaatttcaatggcctcaccggaacaggtgttttgacagaatctaacaaaaaattccttcccttccagcaattcgggagagatggatccggcggcggcggtgacggtggtggcggctccggagacaagacccacacctgccccccttgtcctgcccctgagctgctgggcggaccctccgtgtttctgttcccccccaagcccaaggacaccctgatgatcagccggacccccgaggtcacctgcgtggtggtggacgtcagccacgaggacccagaggtcaagttcaattggtatgtggacggcgtggaggtgcacaacgccaagaccaagccccgggaggaacagtacaacagcacctaccgggtggtgtccgtgctgaccgtgctgcaccaggactggctgaacggcaaagaatacaagtgcaaggtgtccaacaaggccctgcctgcccccatcgagaaaaccatcagcaaggccaagggccagcccagagaaccccaggtgtacaccctgccccctagcagggaagagctgaccaagaaccaggtgtccctgacctgtctggtcaagggcttctaccccagcgatatcgccgtggagtgggagagcaacggccagcctgagaacaactacaagaccaccccccctgtgctggacagcgacggcagcttcttcctgtacagcaagctgaccgtggacaagagccggtggcagcagggcaacgtgtttagctgcagcgtgatgcacgaggccctgcacaaccactacacccagaagagcttaagcctgtcccctggcagt

SEQ ID NO: 690 - DNA, 1371 bp, synthetic construct
  misc_feature 1..1371: note = Synthetic
  source 1..1371: mol_type = other DNA
gcctggaaccggaagagaataagcaactgtgttgcagactatagcgtgctttacaattccgcatcctttagtaccttcaaatgttacggtgtgagccccaccaaactcaatgatctctgtttcacaaacgtgtacgcagatagtttcgttatacgcggggacgaagtacggcagatagcccctggccagacaggaaagatagccgattacaactacaaacttccagacgattttacagggtgtgtgatcgcttggaattcaaataacctggactccaaagtgggaggcaactataattacctgtaccgactgttccgcaaaagcaacttgaaacctttcgagcgagatatatcaaccgaaatctaccaagctggttctacaccttgtaatggtgtggagggatttaactgctacttccctcttcagtcctatggatttcagcctacaaatggagtcgggtatcaaccctatagagtcgtggtgttgtcatttgaacttctccatgcacctgctactgtctgtggtccaaaaaagtccactaatcttgtaaaaaacaaatgcgtgaacttcaatttcaatggcctcaccggaacaggtgttttgacagaatctaacaaaaaattccttcccttccagcaattcgggagagatggatccggcggcggcggtgacggtggtggcggctccggagacaagacccacacctgccccccttgtcctgcccctgagctgctgggcggaccctccgtgtttctgttcccccccaagcccaaggacaccctgatgatcagccggacccccgaggtcacctgcgtggtggtggacgtcagccacgaggacccagaggtcaagttcaattggtatgtggacggcgtggaggtgcacaacgccaagaccaagccccgggaggaacagtacaacagcacctaccgggtggtgtccgtgctgaccgtgctgcaccaggactggctgaacggcaaagaatacaagtgcaaggtgtccaacaaggccctgcctgcccccatcgagaaaaccatcagcaaggccaagggccagcccagagaaccccaggtgtacaccctgccccctagcagggaagagctgaccaagaaccaggtgtccctgacctgtctggtcaagggcttctaccccagcgatatcgccgtggagtgggagagcaacggccagcctgagaacaactacaagaccaccccccctgtgctggacagcgacggcagcttcttcctgtacagcaagctgaccgtggacaagagccggtggcagcagggcaacgtgtttagctgcagcgtgatgcacgaggccctgcacaaccactacacccagaagagcttaagcctgtcccctggcagt

SEQ ID NO: 691 - DNA, 1368 bp, synthetic construct
  misc_feature 1..1368: note = Synthetic
  source 1..1368: mol_type = other DNA
tggaaccggaagagaataagcaactgtgttgcagactatagcgtgctttacaattccgcatcctttagtaccttcaaatgttacggtgtgagccccaccaaactcaatgatctctgtttcacaaacgtgtacgcagatagtttcgttatacgcggggacgaagtacggcagatagcccctggccagacaggaaagatagccgattacaactacaaacttccagacgattttacagggtgtgtgatcgcttggaattcaaataacctggactccaaagtgggaggcaactataattacctgtaccgactgttccgcaaaagcaacttgaaacctttcgagcgagatatatcaaccgaaatctaccaagctggttctacaccttgtaatggtgtggagggatttaactgctacttccctcttcagtcctatggatttcagcctacaaatggagtcgggtatcaaccctatagagtcgtggtgttgtcatttgaacttctccatgcacctgctactgtctgtggtccaaaaaagtccactaatcttgtaaaaaacaaatgcgtgaacttcaatttcaatggcctcaccggaacaggtgttttgacagaatctaacaaaaaattccttcccttccagcaattcgggagagatggatccggcggcggcggtgacggtggtggcggctccggagacaagacccacacctgccccccttgtcctgcccctgagctgctgggcggaccctccgtgtttctgttcccccccaagcccaaggacaccctgatgatcagccggacccccgaggtcacctgcgtggtggtggacgtcagccacgaggacccagaggtcaagttcaattggtatgtggacggcgtggaggtgcacaacgccaagaccaagccccgggaggaacagtacaacagcacctaccgggtggtgtccgtgctgaccgtgctgcaccaggactggctgaacggcaaagaatacaagtgcaaggtgtccaacaaggccctgcctgcccccatcgagaaaaccatcagcaaggccaagggccagcccagagaaccccaggtgtacaccctgccccctagcagggaagagctgaccaagaaccaggtgtccctgacctgtctggtcaagggcttctaccccagcgatatcgccgtggagtgggagagcaacggccagcctgagaacaactacaagaccaccccccctgtgctggacagcgacggcagcttcttcctgtacagcaagctgaccgtggacaagagccggtggcagcagggcaacgtgtttagctgcagcgtgatgcacgaggccctgcacaaccactacacccagaagagcttaagcctgtcccctggcagt

SEQ ID NO: 692 - DNA, 1365 bp, synthetic construct
  misc_feature 1..1365: note = Synthetic
  source 1..1365: mol_type = other DNA
aaccggaagagaataagcaactgtgttgcagactatagcgtgctttacaattccgcatcctttagtaccttcaaatgttacggtgtgagccccaccaaactcaatgatctctgtttcacaaacgtgtacgcagatagtttcgttatacgcggggacgaagtacggcagatagcccctggccagacaggaaagatagccgattacaactacaaacttccagacgattttacagggtgtgtgatcgcttggaattcaaataacctggactccaaagtgggaggcaactataattacctgtaccgactgttccgcaaaagcaacttgaaacctttcgagcgagatatatcaaccgaaatctaccaagctggttctacaccttgtaatggtgtggagggatttaactgctacttccctcttcagtcctatggatttcagcctacaaatggagtcgggtatcaaccctatagagtcgtggtgttgtcatttgaacttctccatgcacctgctactgtctgtggtccaaaaaagtccactaatcttgtaaaaaacaaatgcgtgaacttcaatttcaatggcctcaccggaacaggtgttttgacagaatctaacaaaaaattccttcccttccagcaattcgggagagatggatccggcggcggcggtgacggtggtggcggctccggagacaagacccacacctgccccccttgtcctgcccctgagctgctgggcggaccctccgtgtttctgttcccccccaagcccaaggacaccctgatgatcagccggacccccgaggtcacctgcgtggtggtggacgtcagccacgaggacccagaggtcaagttcaattggtatgtggacggcgtggaggtgcacaacgccaagaccaagccccgggaggaacagtacaacagcacctaccgggtggtgtccgtgctgaccgtgctgcaccaggactggctgaacggcaaagaatacaagtgcaaggtgtccaacaaggccctgcctgcccccatcgagaaaaccatcagcaaggccaagggccagcccagagaaccccaggtgtacaccctgccccctagcagggaagagctgaccaagaaccaggtgtccctgacctgtctggtcaagggcttctaccccagcgatatcgccgtggagtgggagagcaacggccagcctgagaacaactacaagaccaccccccctgtgctggacagcgacggcagcttcttcctgtacagcaagctgaccgtggacaagagccggtggcagcagggcaacgtgtttagctgcagcgtgatgcacgaggccctgcacaaccactacacccagaagagcttaagcctgtcccctggcagt

SEQ ID NO: 693 - DNA, 1362 bp, synthetic construct
  misc_feature 1..1362: note = Synthetic
  source 1..1362: mol_type = other DNA
cggaagagaataagcaactgtgttgcagactatagcgtgctttacaattccgcatcctttagtaccttcaaatgttacggtgtgagccccaccaaactcaatgatctctgtttcacaaacgtgtacgcagatagtttcgttatacgcggggacgaagtacggcagatagcccctggccagacaggaaagatagccgattacaactacaaacttccagacgattttacagggtgtgtgatcgcttggaattcaaataacctggactccaaagtgggaggcaactataattacctgtaccgactgttccgcaaaagcaacttgaaacctttcgagcgagatatatcaaccgaaatctaccaagctggttctacaccttgtaatggtgtggagggatttaactgctacttccctcttcagtcctatggatttcagcctacaaatggagtcgggtatcaaccctatagagtcgtggtgttgtcatttgaacttctccatgcacctgctactgtctgtggtccaaaaaagtccactaatcttgtaaaaaacaaatgcgtgaacttcaatttcaatggcctcaccggaacaggtgttttgacagaatctaacaaaaaattccttcccttccagcaattcgggagagatggatccggcggcggcggtgacggtggtggcggctccggagacaagacccacacctgccccccttgtcctgcccctgagctgctgggcggaccctccgtgtttctgttcccccccaagcccaaggacaccctgatgatcagccggacccccgaggtcacctgcgtggtggtggacgtcagccacgaggacccagaggtcaagttcaattggtatgtggacggcgtggaggtgcacaacgccaagaccaagccccgggaggaacagtacaacagcacctaccgggtggtgtccgtgctgaccgtgctgcaccaggactggctgaacggcaaagaatacaagtgcaaggtgtccaacaaggccctgcctgcccccatcgagaaaaccatcagcaaggccaagggccagcccagagaaccccaggtgtacaccctgccccctagcagggaagagctgaccaagaaccaggtgtccctgacctgtctggtcaagggcttctaccccagcgatatcgccgtggagtgggagagcaacggccagcctgagaacaactacaagaccaccccccctgtgctggacagcgacggcagcttcttcctgtacagcaagctgaccgtggacaagagccggtggcagcagggcaacgtgtttagctgcagcgtgatgcacgaggccctgcacaaccactacacccagaagagcttaagcctgtcccctggcagt

SEQ ID NO: 694 - DNA, 1359 bp, synthetic construct
  misc_feature 1..1359: note = Synthetic
  source 1..1359: mol_type = other DNA
aagagaataagcaactgtgttgcagactatagcgtgctttacaattccgcatcctttagtaccttcaaatgttacggtgtgagccccaccaaactcaatgatctctgtttcacaaacgtgtacgcagatagtttcgttatacgcggggacgaagtacggcagatagcccctggccagacaggaaagatagccgattacaactacaaacttccagacgattttacagggtgtgtgatcgcttggaattcaaataacctggactccaaagtgggaggcaactataattacctgtaccgactgttccgcaaaagcaacttgaaacctttcgagcgagatatatcaaccgaaatctaccaagctggttctacaccttgtaatggtgtggagggatttaactgctacttccctcttcagtcctatggatttcagcctacaaatggagtcgggtatcaaccctatagagtcgtggtgttgtcatttgaacttctccatgcacctgctactgtctgtggtccaaaaaagtccactaatcttgtaaaaaacaaatgcgtgaacttcaatttcaatggcctcaccggaacaggtgttttgacagaatctaacaaaaaattccttcccttccagcaattcgggagagatggatccggcggcggcggtgacggtggtggcggctccggagacaagacccacacctgccccccttgtcctgcccctgagctgctgggcggaccctccgtgtttctgttcccccccaagcccaaggacaccctgatgatcagccggacccccgaggtcacctgcgtggtggtggacgtcagccacgaggacccagaggtcaagttcaattggtatgtggacggcgtggaggtgcacaacgccaagaccaagccccgggaggaacagtacaacagcacctaccgggtggtgtccgtgctgaccgtgctgcaccaggactggctgaacggcaaagaatacaagtgcaaggtgtccaacaaggccctgcctgcccccatcgagaaaaccatcagcaaggccaagggccagcccagagaaccccaggtgtacaccctgccccctagcagggaagagctgaccaagaaccaggtgtccctgacctgtctggtcaagggcttctaccccagcgatatcgccgtggagtgggagagcaacggccagcctgagaacaactacaagaccaccccccctgtgctggacagcgacggcagcttcttcctgtacagcaagctgaccgtggacaagagccggtggcagcagggcaacgtgtttagctgcagcgtgatgcacgaggccctgcacaaccactacacccagaagagcttaagcctgtcccctggcagt

SEQ ID NO: 695 - DNA, 1356 bp, synthetic construct
  misc_feature 1..1356: note = Synthetic
  source 1..1356: mol_type = other DNA
agaataagcaactgtgttgcagactatagcgtgctttacaattccgcatcctttagtaccttcaaatgttacggtgtgagccccaccaaactcaatgatctctgtttcacaaacgtgtacgcagatagtttcgttatacgcggggacgaagtacggcagatagcccctggccagacaggaaagatagccgattacaactacaaacttccagacgattttacagggtgtgtgatcgcttggaattcaaataacctggactccaaagtgggaggcaactataattacctgtaccgactgttccgcaaaagcaacttgaaacctttcgagcgagatatatcaaccgaaatctaccaagctggttctacaccttgtaatggtgtggagggatttaactgctacttccctcttcagtcctatggatttcagcctacaaatggagtcgggtatcaaccctatagagtcgtggtgttgtcatttgaacttctccatgcacctgctactgtctgtggtccaaaaaagtccactaatcttgtaaaaaacaaatgcgtgaacttcaatttcaatggcctcaccggaacaggtgttttgacagaatctaacaaaaaattccttcccttccagcaattcgggagagatggatccggcggcggcggtgacggtggtggcggctccggagacaagacccacacctgccccccttgtcctgcccctgagctgctgggcggaccctccgtgtttctgttcccccccaagcccaaggacaccctgatgatcagccggacccccgaggtcacctgcgtggtggtggacgtcagccacgaggacccagaggtcaagttcaattggtatgtggacggcgtggaggtgcacaacgccaagaccaagccccgggaggaacagtacaacagcacctaccgggtggtgtccgtgctgaccgtgctgcaccaggactggctgaacggcaaagaatacaagtgcaaggtgtccaacaaggccctgcctgcccccatcgagaaaaccatcagcaaggccaagggccagcccagagaaccccaggtgtacaccctgccccctagcagggaagagctgaccaagaaccaggtgtccctgacctgtctggtcaagggcttctaccccagcgatatcgccgtggagtgggagagcaacggccagcctgagaacaactacaagaccaccccccctgtgctggacagcgacggcagcttcttcctgtacagcaagctgaccgtggacaagagccggtggcagcagggcaacgtgtttagctgcagcgtgatgcacgaggccctgcacaaccactacacccagaagagcttaagcctgtcccctggcagt

SEQ ID NO: 696 - DNA, 1353 bp, synthetic construct
  misc_feature 1..1353: note = Synthetic
  source 1..1353: mol_type = other DNA
ataagcaactgtgttgcagactatagcgtgctttacaattccgcatcctttagtaccttcaaatgttacggtgtgagccccaccaaactcaatgatctctgtttcacaaacgtgtacgcagatagtttcgttatacgcggggacgaagtacggcagatagcccctggccagacaggaaagatagccgattacaactacaaacttccagacgattttacagggtgtgtgatcgcttggaattcaaataacctggactccaaagtgggaggcaactataattacctgtaccgactgttccgcaaaagcaacttgaaacctttcgagcgagatatatcaaccgaaatctaccaagctggttctacaccttgtaatggtgtggagggatttaactgctacttccctcttcagtcctatggatttcagcctacaaatggagtcgggtatcaaccctatagagtcgtggtgttgtcatttgaacttctccatgcacctgctactgtctgtggtccaaaaaagtccactaatcttgtaaaaaacaaatgcgtgaacttcaatttcaatggcctcaccggaacaggtgttttgacagaatctaacaaaaaattccttcccttccagcaattcgggagagatggatccggcggcggcggtgacggtggtggcggctccggagacaagacccacacctgccccccttgtcctgcccctgagctgctgggcggaccctccgtgtttctgttcccccccaagcccaaggacaccctgatgatcagccggacccccgaggtcacctgcgtggtggtggacgtcagccacgaggacccagaggtcaagttcaattggtatgtggacggcgtggaggtgcacaacgccaagaccaagccccgggaggaacagtacaacagcacctaccgggtggtgtccgtgctgaccgtgctgcaccaggactggctgaacggcaaagaatacaagtgcaaggtgtccaacaaggccctgcctgcccccatcgagaaaaccatcagcaaggccaagggccagcccagagaaccccaggtgtacaccctgccccctagcagggaagagctgaccaagaaccaggtgtccctgacctgtctggtcaagggcttctaccccagcgatatcgccgtggagtgggagagcaacggccagcctgagaacaactacaagaccaccccccctgtgctggacagcgacggcagcttcttcctgtacagcaagctgaccgtggacaagagccggtggcagcagggcaacgtgtttagctgcagcgtgatgcacgaggccctgcacaaccactacacccagaagagcttaagcctgtcccctggcagt

SEQ ID NO: 697 - DNA, 1350 bp, synthetic construct
  misc_feature 1..1350: note = Synthetic
  source 1..1350: mol_type = other DNA
agcaactgtgttgcagactatagcgtgctttacaattccgcatcctttagtaccttcaaatgttacggtgtgagccccaccaaactcaatgatctctgtttcacaaacgtgtacgcagatagtttcgttatacgcggggacgaagtacggcagatagcccctggccagacaggaaagatagccgattacaactacaaacttccagacgattttacagggtgtgtgatcgcttggaattcaaataacctggactccaaagtgggaggcaactataattacctgtaccgactgttccgcaaaagcaacttgaaacctttcgagcgagatatatcaaccgaaatctaccaagctggttctacaccttgtaatggtgtggagggatttaactgctacttccctcttcagtcctatggatttcagcctacaaatggagtcgggtatcaaccctatagagtcgtggtgttgtcatttgaacttctccatgcacctgctactgtctgtggtccaaaaaagtccactaatcttgtaaaaaacaaatgcgtgaacttcaatttcaatggcctcaccggaacaggtgttttgacagaatctaacaaaaaattccttcccttccagcaattcgggagagatggatccggcggcggcggtgacggtggtggcggctccggagacaagacccacacctgccccccttgtcctgcccctgagctgctgggcggaccctccgtgtttctgttcccccccaagcccaaggacaccctgatgatcagccggacccccgaggtcacctgcgtggtggtggacgtcagccacgaggacccagaggtcaagttcaattggtatgtggacggcgtggaggtgcacaacgccaagaccaagccccgggaggaacagtacaacagcacctaccgggtggtgtccgtgctgaccgtgctgcaccaggactggctgaacggcaaagaatacaagtgcaaggtgtccaacaaggccctgcctgcccccatcgagaaaaccatcagcaaggccaagggccagcccagagaaccccaggtgtacaccctgccccctagcagggaagagctgaccaagaaccaggtgtccctgacctgtctggtcaagggcttctaccccagcgatatcgccgtggagtgggagagcaacggccagcctgagaacaactacaagaccaccccccctgtgctggacagcgacggcagcttcttcctgtacagcaagctgaccgtggacaagagccggtggcagcagggcaacgtgtttagctgcagcgtgatgcacgaggccctgcacaaccactacacccagaagagcttaagcctgtcccctggcagt

SEQ ID NO: 698 - DNA, 1347 bp, synthetic construct
  misc_feature 1..1347: note = Synthetic
  source 1..1347: mol_type = other DNA
aactgtgttgcagactatagcgtgctttacaattccgcatcctttagtaccttcaaatgttacggtgtgagccccaccaaactcaatgatctctgtttcacaaacgtgtacgcagatagtttcgttatacgcggggacgaagtacggcagatagcccctggccagacaggaaagatagccgattacaactacaaacttccagacgattttacagggtgtgtgatcgcttggaattcaaataacctggactccaaagtgggaggcaactataattacctgtaccgactgttccgcaaaagcaacttgaaacctttcgagcgagatatatcaaccgaaatctaccaagctggttctacaccttgtaatggtgtggagggatttaactgctacttccctcttcagtcctatggatttcagcctacaaatggagtcgggtatcaaccctatagagtcgtggtgttgtcatttgaacttctccatgcacctgctactgtctgtggtccaaaaaagtccactaatcttgtaaaaaacaaatgcgtgaacttcaatttcaatggcctcaccggaacaggtgttttgacagaatctaacaaaaaattccttcccttccagcaattcgggagagatggatccggcggcggcggtgacggtggtggcggctccggagacaagacccacacctgccccccttgtcctgcccctgagctgctgggcggaccctccgtgtttctgttcccccccaagcccaaggacaccctgatgatcagccggacccccgaggtcacctgcgtggtggtggacgtcagccacgaggacccagaggtcaagttcaattggtatgtggacggcgtggaggtgcacaacgccaagaccaagccccgggaggaacagtacaacagcacctaccgggtggtgtccgtgctgaccgtgctgcaccaggactggctgaacggcaaagaatacaagtgcaaggtgtccaacaaggccctgcctgcccccatcgagaaaaccatcagcaaggccaagggccagcccagagaaccccaggtgtacaccctgccccctagcagggaagagctgaccaagaaccaggtgtccctgacctgtctggtcaagggcttctaccccagcgatatcgccgtggagtgggagagcaacggccagcctgagaacaactacaagaccaccccccctgtgctggacagcgacggcagcttcttcctgtacagcaagctgaccgtggacaagagccggtggcagcagggcaacgtgtttagctgcagcgtgatgcacgaggccctgcacaaccactacacccagaagagcttaagcctgtcccctggcagt

SEQ ID NO: 699 - DNA, 1344 bp, synthetic construct
  misc_feature 1..1344: note = Synthetic
  source 1..1344: mol_type = other DNA
tgtgttgcagactatagcgtgctttacaattccgcatcctttagtaccttcaaatgttacggtgtgagccccaccaaactcaatgatctctgtttcacaaacgtgtacgcagatagtttcgttatacgcggggacgaagtacggcagatagcccctggccagacaggaaagatagccgattacaactacaaacttccagacgattttacagggtgtgtgatcgcttggaattcaaataacctggactccaaagtgggaggcaactataattacctgtaccgactgttccgcaaaagcaacttgaaacctttcgagcgagatatatcaaccgaaatctaccaagctggttctacaccttgtaatggtgtggagggatttaactgctacttccctcttcagtcctatggatttcagcctacaaatggagtcgggtatcaaccctatagagtcgtggtgttgtcatttgaacttctccatgcacctgctactgtctgtggtccaaaaaagtccactaatcttgtaaaaaacaaatgcgtgaacttcaatttcaatggcctcaccggaacaggtgttttgacagaatctaacaaaaaattccttcccttccagcaattcgggagagatggatccggcggcggcggtgacggtggtggcggctccggagacaagacccacacctgccccccttgtcctgcccctgagctgctgggcggaccctccgtgtttctgttcccccccaagcccaaggacaccctgatgatcagccggacccccgaggtcacctgcgtggtggtggacgtcagccacgaggacccagaggtcaagttcaattggtatgtggacggcgtggaggtgcacaacgccaagaccaagccccgggaggaacagtacaacagcacctaccgggtggtgtccgtgctgaccgtgctgcaccaggactggctgaacggcaaagaatacaagtgcaaggtgtccaacaaggccctgcctgcccccatcgagaaaaccatcagcaaggccaagggccagcccagagaaccccaggtgtacaccctgccccctagcagggaagagctgaccaagaaccaggtgtccctgacctgtctggtcaagggcttctaccccagcgatatcgccgtggagtgggagagcaacggccagcctgagaacaactacaagaccaccccccctgtgctggacagcgacggcagcttcttcctgtacagcaagctgaccgtggacaagagccggtggcagcagggcaacgtgtttagctgcagcgtgatgcacgaggccctgcacaaccactacacccagaagagcttaagcctgtcccctggcagt

SEQ ID NO: 700 - DNA, 1341 bp, synthetic construct
  misc_feature 1..1341: note = Synthetic
  source 1..1341: mol_type = other DNA
gttgcagactatagcgtgctttacaattccgcatcctttagtaccttcaaatgttacggtgtgagccccaccaaactcaatgatctctgtttcacaaacgtgtacgcagatagtttcgttatacgcggggacgaagtacggcagatagcccctggccagacaggaaagatagccgattacaactacaaacttccagacgattttacagggtgtgtgatcgcttggaattcaaataacctggactccaaagtgggaggcaactataattacctgtaccgactgttccgcaaaagcaacttgaaacctttcgagcgagatatatcaaccgaaatctaccaagctggttctacaccttgtaatggtgtggagggatttaactgctacttccctcttcagtcctatggatttcagcctacaaatggagtcgggtatcaaccctatagagtcgtggtgttgtcatttgaacttctccatgcacctgctactgtctgtggtccaaaaaagtccactaatcttgtaaaaaacaaatgcgtgaacttcaatttcaatggcctcaccggaacaggtgttttgacagaatctaacaaaaaattccttcccttccagcaattcgggagagatggatccggcggcggcggtgacggtggtggcggctccggagacaagacccacacctgccccccttgtcctgcccctgagctgctgggcggaccctccgtgtttctgttcccccccaagcccaaggacaccctgatgatcagccggacccccgaggtcacctgcgtggtggtggacgtcagccacgaggacccagaggtcaagttcaattggtatgtggacggcgtggaggtgcacaacgccaagaccaagccccgggaggaacagtacaacagcacctaccgggtggtgtccgtgctgaccgtgctgcaccaggactggctgaacggcaaagaatacaagtgcaaggtgtccaacaaggccctgcctgcccccatcgagaaaaccatcagcaaggccaagggccagcccagagaaccccaggtgtacaccctgccccctagcagggaagagctgaccaagaaccaggtgtccctgacctgtctggtcaagggcttctaccccagcgatatcgccgtggagtgggagagcaacggccagcctgagaacaactacaagaccaccccccctgtgctggacagcgacggcagcttcttcctgtacagcaagctgaccgtggacaagagccggtggcagcagggcaacgtgtttagctgcagcgtgatgcacgaggccctgcacaaccactacacccagaagagcttaagcctgtcccctggcagt

SEQ ID NO: 701 - DNA, 1338 bp, synthetic construct
  misc_feature 1..1338: note = Synthetic
  source 1..1338: mol_type = other DNA
gcagactatagcgtgctttacaattccgcatcctttagtaccttcaaatgttacggtgtgagccccaccaaactcaatgatctctgtttcacaaacgtgtacgcagatagtttcgttatacgcggggacgaagtacggcagatagcccctggccagacaggaaagatagccgattacaactacaaacttccagacgattttacagggtgtgtgatcgcttggaattcaaataacctggactccaaagtgggaggcaactataattacctgtaccgactgttccgcaaaagcaacttgaaacctttcgagcgagatatatcaaccgaaatctaccaagctggttctacaccttgtaatggtgtggagggatttaactgctacttccctcttcagtcctatggatttcagcctacaaatggagtcgggtatcaaccctatagagtcgtggtgttgtcatttgaacttctccatgcacctgctactgtctgtggtccaaaaaagtccactaatcttgtaaaaaacaaatgcgtgaacttcaatttcaatggcctcaccggaacaggtgttttgacagaatctaacaaaaaattccttcccttccagcaattcgggagagatggatccggcggcggcggtgacggtggtggcggctccggagacaagacccacacctgccccccttgtcctgcccctgagctgctgggcggaccctccgtgtttctgttcccccccaagcccaaggacaccctgatgatcagccggacccccgaggtcacctgcgtggtggtggacgtcagccacgaggacccagaggtcaagttcaattggtatgtggacggcgtggaggtgcacaacgccaagaccaagccccgggaggaacagtacaacagcacctaccgggtggtgtccgtgctgaccgtgctgcaccaggactggctgaacggcaaagaatacaagtgcaaggtgtccaacaaggccctgcctgcccccatcgagaaaaccatcagcaaggccaagggccagcccagagaaccccaggtgtacaccctgccccctagcagggaagagctgaccaagaaccaggtgtccctgacctgtctggtcaagggcttctaccccagcgatatcgccgtggagtgggagagcaacggccagcctgagaacaactacaagaccaccccccctgtgctggacagcgacggcagcttcttcctgtacagcaagctgaccgtggacaagagccggtggcagcagggcaacgtgtttagctgcagcgtgatgcacgaggccctgcacaaccactacacccagaagagcttaagcctgtcccctggcagt

SEQ ID NO: 702 - DNA, 1335 bp, synthetic construct
  misc_feature 1..1335: note = Synthetic
  source 1..1335: mol_type = other DNA
gactatagcgtgctttacaattccgcatcctttagtaccttcaaatgttacggtgtgagccccaccaaactcaatgatctctgtttcacaaacgtgtacgcagatagtttcgttatacgcggggacgaagtacggcagatagcccctggccagacaggaaagatagccgattacaactacaaacttccagacgattttacagggtgtgtgatcgcttggaattcaaataacctggactccaaagtgggaggcaactataattacctgtaccgactgttccgcaaaagcaacttgaaacctttcgagcgagatatatcaaccgaaatctaccaagctggttctacaccttgtaatggtgtggagggatttaactgctacttccctcttcagtcctatggatttcagcctacaaatggagtcgggtatcaaccctatagagtcgtggtgttgtcatttgaacttctccatgcacctgctactgtctgtggtccaaaaaagtccactaatcttgtaaaaaacaaatgcgtgaacttcaatttcaatggcctcaccggaacaggtgttttgacagaatctaacaaaaaattccttcccttccagcaattcgggagagatggatccggcggcggcggtgacggtggtggcggctccggagacaagacccacacctgccccccttgtcctgcccctgagctgctgggcggaccctccgtgtttctgttcccccccaagcccaaggacaccctgatgatcagccggacccccgaggtcacctgcgtggtggtggacgtcagccacgaggacccagaggtcaagttcaattggtatgtggacggcgtggaggtgcacaacgccaagaccaagccccgggaggaacagtacaacagcacctaccgggtggtgtccgtgctgaccgtgctgcaccaggactggctgaacggcaaagaatacaagtgcaaggtgtccaacaaggccctgcctgcccccatcgagaaaaccatcagcaaggccaagggccagcccagagaaccccaggtgtacaccctgccccctagcagggaagagctgaccaagaaccaggtgtccctgacctgtctggtcaagggcttctaccccagcgatatcgccgtggagtgggagagcaacggccagcctgagaacaactacaagaccaccccccctgtgctggacagcgacggcagcttcttcctgtacagcaagctgaccgtggacaagagccggtggcagcagggcaacgtgtttagctgcagcgtgatgcacgaggccctgcacaaccactacacccagaagagcttaagcctgtcccctggcagt

SEQ ID NO: 703 - DNA, 1332 bp, synthetic construct
  misc_feature 1..1332: note = Synthetic
  source 1..1332: mol_type = other DNA
tatagcgtgctttacaattccgcatcctttagtaccttcaaatgttacggtgtgagccccaccaaactcaatgatctctgtttcacaaacgtgtacgcagatagtttcgttatacgcggggacgaagtacggcagatagcccctggccagacaggaaagatagccgattacaactacaaacttccagacgattttacagggtgtgtgatcgcttggaattcaaataacctggactccaaagtgggaggcaactataattacctgtaccgactgttccgcaaaagcaacttgaaacctttcgagcgagatatatcaaccgaaatctaccaagctggttctacaccttgtaatggtgtggagggatttaactgctacttccctcttcagtcctatggatttcagcctacaaatggagtcgggtatcaaccctatagagtcgtggtgttgtcatttgaacttctccatgcacctgctactgtctgtggtccaaaaaagtccactaatcttgtaaaaaacaaatgcgtgaacttcaatttcaatggcctcaccggaacaggtgttttgacagaatctaacaaaaaattccttcccttccagcaattcgggagagatggatccggcggcggcggtgacggtggtggcggctccggagacaagacccacacctgccccccttgtcctgcccctgagctgctgggcggaccctccgtgtttctgttcccccccaagcccaaggacaccctgatgatcagccggacccccgaggtcacctgcgtggtggtggacgtcagccacgaggacccagaggtcaagttcaattggtatgtggacggcgtggaggtgcacaacgccaagaccaagccccgggaggaacagtacaacagcacctaccgggtggtgtccgtgctgaccgtgctgcaccaggactggctgaacggcaaagaatacaagtgcaaggtgtccaacaaggccctgcctgcccccatcgagaaaaccatcagcaaggccaagggccagcccagagaaccccaggtgtacaccctgccccctagcagggaagagctgaccaagaaccaggtgtccctgacctgtctggtcaagggcttctaccccagcgatatcgccgtggagtgggagagcaacggccagcctgagaacaactacaagaccaccccccctgtgctggacagcgacggcagcttcttcctgtacagcaagctgaccgtggacaagagccggtggcagcagggcaacgtgtttagctgcagcgtgatgcacgaggccctgcacaaccactacacccagaagagcttaagcctgtcccctggcagt

SEQ ID NO: 704 - DNA, 1329 bp, synthetic construct
  misc_feature 1..1329: note = Synthetic
  source 1..1329: mol_type = other DNA
agcgtgctttacaattccgcatcctttagtaccttcaaatgttacggtgtgagccccaccaaactcaatgatctctgtttcacaaacgtgtacgcagatagtttcgttatacgcggggacgaagtacggcagatagcccctggccagacaggaaagatagccgattacaactacaaacttccagacgattttacagggtgtgtgatcgcttggaattcaaataacctggactccaaagtgggaggcaactataattacctgtaccgactgttccgcaaaagcaacttgaaacctttcgagcgagatatatcaaccgaaatctaccaagctggttctacaccttgtaatggtgtggagggatttaactgctacttccctcttcagtcctatggatttcagcctacaaatggagtcgggtatcaaccctatagagtcgtggtgttgtcatttgaacttctccatgcacctgctactgtctgtggtccaaaaaagtccactaatcttgtaaaaaacaaatgcgtgaacttcaatttcaatggcctcaccggaacaggtgttttgacagaatctaacaaaaaattccttcccttccagcaattcgggagagatggatccggcggcggcggtgacggtggtggcggctccggagacaagacccacacctgccccccttgtcctgcccctgagctgctgggcggaccctccgtgtttctgttcccccccaagcccaaggacaccctgatgatcagccggacccccgaggtcacctgcgtggtggtggacgtcagccacgaggacccagaggtcaagttcaattggtatgtggacggcgtggaggtgcacaacgccaagaccaagccccgggaggaacagtacaacagcacctaccgggtggtgtccgtgctgaccgtgctgcaccaggactggctgaacggcaaagaatacaagtgcaaggtgtccaacaaggccctgcctgcccccatcgagaaaaccatcagcaaggccaagggccagcccagagaaccccaggtgtacaccctgccccctagcagggaagagctgaccaagaaccaggtgtccctgacctgtctggtcaagggcttctaccccagcgatatcgccgtggagtgggagagcaacggccagcctgagaacaactacaagaccaccccccctgtgctggacagcgacggcagcttcttcctgtacagcaagctgaccgtggacaagagccggtggcagcagggcaacgtgtttagctgcagcgtgatgcacgaggccctgcacaaccactacacccagaagagcttaagcctgtcccctggcagt
